(19) United States
(12) Patent Application Publication
(10) Pub. No.: US 2012/0096591 A1
(43) Pub. Date: Apr. 19, 2012

(54) Identification and Validation of Novel Targets for Agrochemicals

(76) Inventors: Dirk Inze, Moorsel-Aalst (BE); Willem Broekaert, Dilbeek (BE)

(21) Appl. No.: 13/210,461

(22) Filed: Aug. 16, 2011

Related U.S. Application Data
(63) Continuation of application No. 10/510,871, filed on Jun. 2, 2005, now abandoned.

(30) Foreign Application Priority Data
Apr. 10, 2002 (EP) 02 447 062.7

(51) Int. Cl. A01H 1/06; A01H 5/00; C12N 15/12

(52) U.S. Cl. 800/288; 536/23.5; 800/298

(57) ABSTRACT

The invention relates to a method for identifying and validating plant targets for agrochemicals, comprising the steps of determining gene or protein expression profiles in function of the progression of an essential biological process in a plant subsequent downregulation of expression of said gene or protein in a plant cell. More particularly, the effects of downregulation of the candidate target gene were directly monitored on plants locally infected with a vector mediating viral induced gene suppression in that infected plant area. The invention also relates to isolated plant genes encoding proteins involved in plant growth and development. The invention also relates to plants tolerant to agrochemicals such as herbicides or pesticides.

[0001] The invention relates to isolated plant genes encoding proteins essential for plant growth and development and to methods for identifying and validating these genes/proteins as target genes/proteins for agrochemicals, such as herbicides. A target for an agrochemical is a gene or a protein where the agrochemical interferes with when applied to the target organism.

[0002] For the identification and validation of useful agrochemicals, the agrochemical industry traditionally relied on in vivo screening methods wherein chemical compounds were brought into direct contact with the living target organisms (e.g. plants for herbicide screening, insects for insecticide screening, etc.). However due to (i) the dramatic increase in the number of compounds that need to be screened to find a successful new agrochemical product, and (ii) the need to rely on very small quantities of compound such as are available in a combinatorial chemistry based compound libraries, and (iii) the need to identify compounds with a novel mode of action, the industry has developed a considerable interest in using more efficient and faster in vitro screening methods.

[0003] To render such in vitro screening methods more successful, it is essential to carefully select the tested target gene/proteins and/or the tested agrochemicals. It has been described that a more practical in vitro approach for finding new agrochemicals would involve identification of target genes/proteins against which the agrochemical compounds could possibly work. For this process identification of suitable target genes/proteins, the conventional methods make use of gene knock-outs of the target organism. Gene knock-out libraries are generally made as a random collection of thousands of gene knock-outs. In these methods it is investigated if the gene/protein is essential for the growth and/or viability of the organism, since the knockout of an essential gene (when present in a homozygous state) leads to a lethal or otherwise detrimental effect on the organism. The indication that said gene/protein is essential to the organisms makes it a suitable target for an agrochemical. These conventional methods are still cumbersome and time consuming because of the use of gene-knockouts. Other techniques that are useful to estimate the essential character of a gene or its corresponding protein are based on the downregulation of said gene or protein for example via anti-sense expression technology (WO0107601).

[0004] To render an in vitro screening for agrochemicals more successful, it is essential to carefully select the tested target gene/proteins. Therefore a more practical in vitro approach for finding new agrochemicals could be a multistep process involving the steps of (1) identification of target genes/proteins against which the agrochemical compounds could possibly work, (2) validation of the candidate target gene as being an essential gene/protein for the organism and (3) use of these target genes/proteins in an in vitro screening procedure in which the chemical compounds are tested.

[0005] It is the aim of the present invention to develop a process for the more efficient identification of candidate target genes/proteins for agrochemicals, combined with the more efficient validation of the target genes/proteins. It is a further aim of the invention to provide this process in order to design more efficiently the screening procedure with the agrochemical compound.

[0006] The method of the present invention is based on the direct use of genetic information for example generated by expression profiling of the candidate target genes/proteins, for the identification and the validation of the targets.

[0007] Therefore according to a first embodiment of the present invention, there is now provided a method for identifying and validating plant genes/proteins as targets for agrochemicals, said method comprising the steps of:
[0008] a. determining gene or protein expression profiles during a biological process of a plant or plant cell, said biological process being necessary for the viability or the growth of the plant or plant cell;
[0009] b. selecting genes or proteins having altered expression during said biological process,
[0010] c. cloning said selected gene or the nucleic acid encoding said protein in its full-length or partial form,
[0011] d. incorporating said nucleic acid in a vector designed for downregulation of expression of said nucleic acid or the sequence homologous to said nucleic acid in a plant or plant cell.

[0012] The aim of methods of the present invention is the identification of target gene(s)/protein(s) out of a broad range of candidate plant genes/proteins. The identification step is achieved by the techniques of expression profiling described in the following embodiments. Since the method of the present invention can be used for identification of genes/proteins or proteins, the term “target” as used herein can mean a gene as well as a gene product, namely a protein, polypeptide or peptide. With the expression “target for an agrochemical” is meant a protein as well as a gene or nucleic acid encoding such protein, and when such target is inhibited, stimulated or otherwise disrupted in its normal activity by an agrochemical compound, this would lead to a desired effect in a target organism. The invention aims at efficiently identifying targets for agrochemicals. Said agrochemicals can be herbicides or pesticides as well as growth stimulators or growth regulators.

[0013] Target identification means selecting candidate targets from a larger number of genes/proteins or proteins on the basis of certain properties that give such a molecule a higher probability of being a suitable target than other molecules which do not exhibit said properties.

[0014] A herbicide target is a protein or gene that when inhibited, stimulated or otherwise disrupted in its normal activity by a compound would kill the (weedy) target plant or have a strong negative effect on its growth, said compound would therefore be a candidate herbicide. An insecticide target is a protein or gene that when inhibited, stimulated or otherwise disrupted in its normal activity by a compound would kill the insect pest or have a strong negative effect on its growth, said compound would therefore be a candidate insecticide. A plant growth regulator (PGR) target is a protein or gene that when inhibited, stimulated or otherwise disrupted in its normal activity by a compound would promote or alter in a desirable way the growth of plant, said compound would therefore be a candidate PGR.

[0015] Nowadays a lot of genomic information, e.g. gene sequences, expression profiles, homologies and putative functionality, is available from genomic sequencing and expression studies in several target organisms. It is therefore of interest to develop a new method to identify and validate genes/proteins as candidate targets for agrochemicals, such methods being based on a direct use of such genomic information. This use of genomic information, e.g. the expression level of a gene, allows the selection of a limited set of appropriate candidate genes/proteins. Only this limited set of genes is then tested in the validation step, contributing to a higher efficiency and success rate of the screening procedure for agrochemicals. Furthermore, the genetic information, e.g. the functional data of the putative target gene/protein, is used as a basis to design more efficiently the in vitro screening procedure with the agrochemical compound(s) under investigation.

[0016] The present invention discloses methods that allow for the identification and validation of target genes/proteins for agrochemicals out of the broad range of possible genes/proteins and proteins. It therefore allows genes or proteins to be selected for the development of suitable in vitro screening methods for the screening of novel and efficient agrochemicals.

[0017] According to a first step of the methods of the present invention target genes or gene products are identified by using transcript profiling of the genomic content of a cell. By using this technique one immediately obtains genomic data (sequences and expression level) as well as a functional indication of the candidate target gene or gene product. Thus this method is useful for a first identification and selection of possible agrochemical target genes/proteins, since it provides as a bonus genomic and functional data on the candidate target. A good candidate target gene is a gene of which the expression varies significantly over the course of an essential biological process of the cell, since that is an indication that the gene/protein is involved in that biological process The present application describes for the first time that the determination of an expression profile of a gene during the progression of an essential biological process is used to identify possible agrochemical targets.

[0018] The expression profiling in the target identification steps of the method of the present invention is carried out in function of the progression of a process that is essential for plant growth and/or plant development and/or plant viability. In one preferred embodiment of the present invention, the essential process that is monitored in the target identification step is the process of cell division. Accordingly, in a particular embodiment of the invention, the method to identify target genes/proteins for agrochemicals is based on the transcript profiling of genes/proteins that are specifically involved in cell division. Therefore the invention provides a method as mentioned above, wherein said biological process cell division.

[0019] Other biological processes that may be monitored for the identification and validation of agrochemical targets are for instance processes that are essential for seed germination, leaf formation, etc.

[0020] The term expression profiling means determining the time and/or place when or where a gene or a protein is active. Particularly for a gene, this is achieved by monitoring the level of transcripts and therefore in the case of gene expression profiling the term transcript profiling or mRNA profiling is used.

[0021] Generally, the expression profiling in the methods of the present invention is carried out in function of the progression of a process that is essential for plant growth and/or development and/or plant viability. To achieve this, the process of interest is synchronized in a sufficient number of cells (for example in a cell culture) or organisms to allow collecting samples for expression profiling representing various stages of said process. Target identification then consists in selecting those genes or proteins that show significant changes in expression levels in function of the progression of the process of interest. It are those genes or proteins that are likely to be strongly involved or to be essential in said process.

[0022] The term “essential” means that if the gene or the gene product cannot function as normal in the cell or organism, this will have significant implication in the cell growth or cell development or other vital functions of the cell or organism.

[0023] According to the invention, the expression profiling can be studied at the level of m-RNA, using transcript profiling techniques, or alternatively at the level of protein, using proteomics-based approaches.

[0024] In one preferred embodiment of the invention, m-RNA profiling is used for identification of target genes/proteins and expression levels may be quantified via techniques that are well known to the man skilled in the art. For instance, mRNA-profiling can be performed using micro-array or macro-array technologies, this method however requires that the gene sequences are known (full length sequences or at least partial sequences) and are physically available for coating on the micro or macro array surface. Standard chips are being commercialized for Arabidopsis, and sufficient sequence information is now available for different plant species (including rice) to allow sufficient sequence data for this approach. Another approach for mRNA profiling is the use of AFLP-based transcript profiling as described in example 1. In this approach short sequence tags are monitored. In a next step these short sequence tags may be matched with full-length genes/proteins if required. Gene or protein selection thus be based on either full-length or partial sequences and it is well within the realm of the person skilled in the art to find a full length sequence based on the knowledge of a partial sequence.

[0025] Therefore, one aspect of the invention is the direct use of genetic information to select candidate targets for agrochemicals. As mentioned above this genetic information can be generated by a number of techniques. Accordingly, the present invention encompasses a method as mentioned above, wherein the expression profiles are determined by means of micro-array, macro array or c-DNA-AFLP.

[0026] According to another embodiment of the invention, proteomic based approaches may be used to identify candidate target proteins for agrochemicals.

[0027] It is now demonstrated that for the purposes of identifying a target gene for agrochemicals a synchronized culture of dividing plant cells is used to isolate samples and to monitor the expression of the transcripts of those cells during the progression of the cell division.

[0028] Therefore according to a particular embodiment, the invention also encompasses a method for the identification and validation of plant agrochemical targets, wherein said gene or protein expression profiling is based on nucleic acid or protein samples collected from a synchronized culture of dividing plant cells.

[0029] In one embodiment of the invention, the samples used for expression profiling are obtained from a synchronized culture of rice cells, tobacco cells, Arabidopsis cells or cells from any other plant species. The cell culture should be synchronized in order to obtain samples containing a sufficient amount of cells that are at the same stage of the biological process, so that the various samples taken for expression profiling are representative for the various stages of the essential biological process. In a particular embodiment of the present invention the samples are obtained from cells that are synchronized for cell division. In a preferred embodiment of the invention expression profiling is done on synchronized dividing cells. Certain cell lines are particularly suitable for synchronization of cell division, for instance synchronization of tobacco Bright Yellow-2 cell lines as described in example 1. Therefore most preferably, the synchronized cells are tobacco BY2 cells. By using synchronized tobacco BY2 cells and performing a cDNA-AFLP-based genome-wide expression analysis, the inventors built a large collection of plant cell cycle-modulated genes/proteins. Approximately 1340 periodically expressed genes/proteins were identified, including known cell cycle control genes as well as numerous novel genes. A number of plant-specific genes were found for the first time to be cell cycle modulated. Other transcript tags were derived from unknown plant genes showing homology to cell cycle-regulatory genes of other organisms. Many of the genes encode novel or uncharacterised proteins, indicating that several processes underlying cell division are still largely unknown. These sequences are presented herein as SEQ ID NO 1 to SEQ ID NO 785.

[0030] While, according to the invention, the basic criterion for identifying an agrochemical target gene or gene product consists in the differential expression levels of the gene or the protein observed during the progression of an essential biological progress, secondary selection criteria can be used and combined with this primary criterion.

[0031] One such secondary criterion may be to make a selection of genes or proteins that are found not to exhibit a high degree of homology with genes or proteins from other organisms (such as mammals) as this criterion is likely to reduce the probability that the agrochemical compounds active on the “plant-specific” target genes or gene products would also exhibit toxic effects against other organisms, for example mammals.

[0032] Another secondary selection criterion could exist in focusing on a particular phase of the essential biological process as mentioned above. For instance, when cell division modulated genes/proteins are under investigation as potential agrochemical target genes/proteins, one could preferably use those cell division modulated genes/proteins which exhibit high expression during the G1 phase, S phase, G2 phase or M phase or at the transition stages of these phases. In one embodiment of the present invention, the focus may be on the G2/M transition phase, since this phase in the plant cell cycle is considered to have more “plant specific” elements than other phases of the cell cycle and is therefore more likely to yield plant specific candidate target genes and proteins. Whereas the core cell cycle genes/proteins and the basic regulatory mechanisms controlling cell cycle progression are conserved among higher eukaryotes, basic developmental differences between plants and other organisms imply that plant-specific regulatory pathways exist that control cell division. Especially for events occurring at mitosis, plants are expected to have developed unique mechanisms regulating karyo- and cytokinesis. A typical plant cell is surrounded by a rigid wall and can as such not divide by constriction. Instead, a new cell wall between daughter nuclei is formed by a unique cytoskeletal structure called the phragmoplast, whose position is dictated by another cytoskeletal array called the preprophase band. Another major difference between plant and animal mitosis is found in the structure of the mitotic spindles: in animals, they are tightly centred at the centrosome, whereas in plants they have a diffuse appearance.

[0033] Therefore a suitable second criterion to combine with the first criterion may be to select genes/proteins that are involved in the mitosis step of the cell cycle and/or that are involved in the building of the cell wall during mitosis.

[0034] Likewise a secondary selection criterion to be combined with the first criterion may be the selection of genes or proteins from a dicotyledonous plant that do not exhibit a high degree of homology with genes or proteins from a monocotyledonous plant (or vice versa). This secondary criterion is especially relevant when identifying agrochemical target genes or proteins with the intention to selectively identify targets that would allow for subsequence screening of selective herbicides or plant growth regulators. For instance, this strategy is advantageous to find targets and agrochemicals for selective weed control, such as herbicides that kill dicotyledonous weeds in monocotyledonous crops or vice versa.

[0035] Therefore according to further embodiments, the present invention encompasses methods as mentioned above, wherein the target gene or protein meets any one or more of the above mentioned secondary selection criteria, such as being plant specific, being mitosis specific or being dicot specific etc.

[0036] The possibility for combination of criteria used for selecting target genes or proteins renders the method of the present invention more powerful than classical methods. According to a preferred embodiment the technique of the present invention allows identifying genes/proteins, to be used as agrochemical target genes/proteins, these genes being genes/proteins that are involved in cell division and control of cell cycle progression, and these genes being novel and these genes being plant specific. Therefore the method of the present invention is characterized in that it allows identifying new and unexpected agrochemical targets.

[0037] In the target gene identification step according to the present invention, genes or proteins are selected for which there is a high probability of being essential. It should be clear that the above-mentioned examples are given by way of illustration and are not meant to be limiting in any way.

[0038] Further, according to a second step in the method of the invention, the candidate agrochemical target gene or gene product is subsequently validated as being essential for the growth and/or development and/or viability of the organism. This is achieved by cloning the identified candidate target gene in a vector construct designed to downregulate said target gene in a plant or plant cell, followed by inoculating the plant with this construct and monitoring whether downregulation of the gene results in negative effects on plant growth and/or development and/or viability. A valid target gene is a target gene that causes significant effects on growth of plants or plant cells when downregulated. The present application describes for the first time the use of a particularly fast and efficient downregulation method to validate possible agrochemical targets.

[0039] Accordingly, the present invention encompasses a method as mentioned above for the identification and validation of plant targets for agrochemicals, wherein said downregulation involves a viral-induced gene silencing mechanism.

[0040] Thus, starting from a number of candidate target genes/proteins identified in the first step of the method of the invention, the target validation step aims at confirming and demonstrating the essential nature of the gene by demonstrating that severe down-regulation of the expression level of the gene has a significant effect on the organism.

[0041] In particular, when one is interested in developing a screening assay for herbicides, downregulation of the candidate target gene in a plant may result in a lethal effect, a severe inhibition of plant growth or any other (obviously) negative phenotypic effects. Alternatively, when one is interested in developing a screening assay for plant growth regulators, the effect of downregulating the target gene may be modulation or even stimulation of growth in general or modulation or even stimulation of a particular process associated with plant growth and/or development and/or architecture and/or physiology and/or biochemistry or any other phenotypic effect.

[0042] The man skilled in the art will be aware of various methods to achieve downregulation of a given gene or protein, such methods include essentially co-suppression based approaches or anti-sense based approaches as well as any other method resulting in gene silencing. Other examples of downregulation in a cell are well documented in the art and include, for example, RNAi techniques, the use of ribozymes etc. Gene silencing may also be achieved by insertion mutagenesis (for example, T-DNA insertion or transposon insertion) or by gene silencing strategies as described by, among others, Angell and Baulcombe, 1998 (WO 98/36083), Lowe et al., 1989 (WO 98/53083), Lederer et al., 1999 (WO 99/15682) or Wang et al., 1999 (WO 99/53050). Expression of an endogenous gene may also be reduced if the endogenous gene contains a mutation.

[0043] The effect of gene downregulation can be observed in stably transformed plants which can be obtained by means of various well known techniques, these techniques generally involving a plant transformation step and a plant regeneration step.

[0044] Genes/proteins which exhibit a severe negative effect when downregulated may however significantly reduce transformation and/or regeneration efficiency. Therefore, a relevant parameter indicative for the essential nature of the gene, may be a severe reduction in transformation efficiency when said particular gene is used in a down-regulation construct. In order to avoid the (negative) effect on transformation efficiency in the transformation and regeneration process, an inducible promoter system can be used. Induction of promoter activity can then be applied at a later stage (after transformation) in order to observe the effect of gene downregulation once the transformed plant or plantlet started to develop.

[0045] Further, another method for testing the effect of downregulation of a target gene, which can be used in the methods of the present invention, is based on a rapid transient transformation process and does not rely on the somewhat lengthy process of stable transformation. The use of this method for target validation in plants is part of this invention, regardless of whether target identification has been performed according to this invention.

[0046] Accordingly, in a preferred embodiment, the downregulation method is based on co-suppression and on rapid transient transfection of plant cells. The preferred method to validate genes/proteins as targets for agrochemicals is based on the cloning of the identified candidate target gene in a vector construct containing a viral replicase that is involved in the very efficient downregulation of the candidate target gene in the infected plant or plant cell via the mechanism of co-suppression. One advantage of this method for downregulation, is the fact that the infection of the host cells or the plant can be performed locally for example by inoculating the vector directly on the leaves. This allows a very fast evaluation of the effect of downregulating the candidate target since no complete transgenic plants have to be generated. Also this technique allows an easy way of monitoring the effect of the downregulated candidate target by simply looking at the changes of the infected place, for example monitoring the lethal effects on the infected leaf).

[0047] Therefore in a preferred embodiment, the downregulation method is based on co-suppression. In a more preferred embodiment of the invention this co-suppression technique is fast and easy to evaluate the effect of downregulation, so that it is suitable for dealing with high numbers of genes/proteins. This can be achieved by using viral induces gene silencing mechanisms (VIGS) and by infecting the plant directly and locally, for example on the leaves. Therefore, according to another embodiment, the present invention relates to the use of a viral-induced gene silencing system for validating plant targets for agrochemicals.

[0048] This method for severe downregulation via transient expression of the gene in the presence of certain viral elements is referred to as “virus-induced gene silencing mechanism” (VIGS) and is previously described in Ratcliff et al., Plant J., 25 237-245, 2001. Briefly, virus vectors carrying host-derived sequence inserts induce silencing of the corresponding genes/proteins in infected plants. This virus-induced gene silencing is a manifestation of an RNA-mediated defence mechanism that is related to post-transcriptional gene silencing in transgenic plants. Ratcliff et al., developed an infectious cDNA clone of Tobacco rattle virus (TRV) that has been modified to facilitate insertion of non-viral sequences and subsequent infection in plants. This vector mediates VIGS of endogenous genes/proteins in the absence of virus-induced symptoms. Unlike the other RNA virus vectors that have been used previously for VIGS, the TRV construct is able to target most RNA's in the growing points of the plant. A more detailed description of this downregulation mechanism is given in example 2.

[0049] According to particular embodiments of the present invention, the VIGS system is applied in Arabidopsis or in tobacco for the purposes of validation of a candidate agrochemical target gene.

[0050] According to a further preferred embodiment, there is provided a method for validation of a candidate agriochemical target gene, wherein the gene is downregulated in a plant via the use of infectious DNA of virus is Tobacco Rattle Virus and wherein said plant is tobacco.

[0051] The present invention relates to a combination of the above-mentioned identification and validation steps, which are especially selected so that they lead to an efficient selection of candidate target genes for agrochemicals. The outcome of the transcript profiling provides the necessary information and forms the basis for the second step, namely the validation of the target gene via incorporation of the gene sequence in the downregulation construct. The combination of these two techniques is especially useful for selecting suitable target genes/proteins for agrochemicals in a high throughput fashion. This technique thus overcomes the technical limitations of previously described techniques such as the knock-out libraries and the antisense strategies without genetic information of the genes. This new combination offers a time-saving strategy for identification of a candidate target gene and the more direct information output in the form of a real sequence, the immediate cloning of the gene in the downregulation construct and immediate application of the downregulating construct on the target organism.

[0052] The combination of these steps offers the unique opportunity to provide many high quality target genes/proteins for agrochemicals in a commercially and economically advantageous way. Furthermore, inherent to the techniques of the present invention is that the qualified target genes/proteins are accompanied with the necessary information to design a suitable in vitro screening assay with the agrochemical. This information consists of the expression characteristics of the genes/proteins and their function and importance in the essential biological process that was monitored during the transcript profiling.

[0053] In this way, the methods of the present invention overcome the practical and commercial limitations of the existing techniques.

[0054] Once this level of target validation is reached, the validated target can be selected for the development of an appropriate high-throughput in vitro screening method, wherein the agrochemical is tested. Therefore, the present invention also encompasses a method for screening candidate agrochemical compounds, comprising the use of any of the identification procedures and/or validation procedures as mentioned above. More particularly, the present invention encompasses a method for screening agrochemical compounds, comprising the use of any one or more of the sequences represented in SEQ ID NO 1 to 785.

[0055] Various methods can be used to develop suitable in vitro assays for screening the chemical compounds, depending on what is known about the biological activity of the target gene. For example, when the target is an enzyme, measurement of the enzymatic activity of the target could form the basis of the in vitro screening assay with the chemical compound.

[0056] Therefore, the methods of the present invention, the genes/proteins and the information generated by the combined identification and validation methods of the present invention, allow one to design and/or fine tune a screening for testing and/or developing agrochemicals (for example herbicides). For example if the expression pattern and the role of the target gene in the essential biological process is known, it is much easier to set up an in vitro screening assay to monitor the effect of a candidate herbicide on the target cells. Therefore it is expected that much more refined and/or efficient herbicides will be characterized using the methods of the present invention.

[0057] Also because of the knowledge of its function, one can further design the screened agrochemical compound to improve its activity for instance to improve its binding capacity to the target.

[0058] Therefore, the present invention encompasses a method for screening candidate agrochemical compounds comprising the use of any of the methods as mentioned above.

[0059] The invention may also be applied for the development of agrochemical (for example herbicide or pesticide) tolerant plants, plant tissues, plant seeds and plant cells.

[0060] Herbicides that exhibit greater potency can also have greater crop phytotoxicity. A solution to this problem is to develop crops that are resistant or tolerant to herbicides. Crop hybrids or varieties that are tolerant to the herbicides allow, for instance, for the use of herbicides that kill weeds without attendant risk of damaging the crop. Further it should be clear that when a plant is overexpressing the target of a particular herbicide, the tolerance of said plant against said herbicide will also be enhanced.

[0061] Therefore the present invention also relates to the use of the agrochemical (e.g. herbicide) target genes/proteins as identified by the method of the present invention for generating transgenic plants that are tolerant or resistant to an agrochemical (e.g. herbicide). Example of genes and gene sequences identified by the combined identification and validation methods of the present invention and which can be used as agrochemical target or that can be used to obtain herbicide tolerant plants comprise the sequences as represented in any of SEQ ID NOs 1 to 785.

[0062] These sequences are derived from tobacco, but the one skilled in the art can easily find via homology search in databases or homology search in a cDNA library the homologues genes of other plant species, for instance monocot sequences (e.g the corresponding rice or corn sequence), and use them for the same purposes as described herein. These homology searches can be done for example with a BLAST program (Altschul et al., Nucl. Acids Res., 25 3389-3402, 1997) on a sequence database such as the GenBank database. Homology studies as referred to above can be performed using sequences present in public and/or proprietary databases and using several bioinformatics algorithms, well known to the man skilled in the art. Methods for the alignment of sequences are well known in the art, such methods include GAP, BESTFIT, BLAST, FASTA and TFASTA. GAP uses the algorithm of Needleman and Wunsch (J. Mol. Biol. 48: 443-453, 1970) to find the alignment of two complete sequences that maximizes the number of matches and minimizes the number of gaps. The BLAST algorithm calculates percent sequence identity and performs a statistical analysis of the similarity between the two sequences. The software for performing BLAST analysis is publicly available through the National Centre for Biotechnology Information.

[0063] Further, some of the tobacco sequences identified by the method of the present invention might be partial but again, the full-length sequence can easily be found based on the partial sequence. For example “transcript building” can be done based on homology search on EST databases, cDNA's or gene predictions. These databases and programs are publicly available e.g. http://www.tigr.org/.

[0064] Therefore the present invention relates to the use of the nucleic acids as identified and disclosed herein and represented in SEQ ID NO 1 to 785, and also to the use of the full length genes regenerated from the partial sequences as well as to the use of the homologues sequences isolated from the same or from other plants.

[0065] In another embodiment, the present invention relates to a nucleic acid identified according to the method of the invention. Thus the invention encompasses an isolated nucleic acid identifiable by any of the methods as mentioned above.

[0066] In another embodiment, the invention relates to a nucleic acid identified according to the method of the invention, comprising the nucleic acid sequence chosen from the group of SEQ ID NO 1 to 785 or a full length sequence thereof, or a functional homologue thereof, or a functional fragment thereof, or an immunologically active fragment thereof. Thus the invention encompasses an isolated nucleic acid, comprising at least part of a nucleic acid sequence chosen from the group of SEQ ID NO 1 to 785 a homologue, functional fragment or derivative thereof.

[0067] With “a functional fragment” is meant any part of the sequence that is responsible for the biological function or for an aspect of the biological function of the nucleic acid sequence.

[0068] Further, the invention encompasses a method for the production of an agrochemical resistant plant, comprising the use of any one or more of SEQ ID NO 1 to 785 or a homologue, functional fragment or derivative thereof or one or more of the proteins encoded by SEQ ID NO 1 to 785 or a homologue, functional fragment or derivative thereof.

[0069] In one embodiment of the present invention the sequences, the full-length sequences and the homologues are used to develop herbicide tolerant plants.

[0070] Further the invention encompasses a plant tolerant to an agrochemical, in which the expression level of one or more of the nucleic acids corresponding the SEQ ID NO 1 to 785 or the homologue, functional fragment or derivative thereof, is modulated. Further the invention encompasses any part or more preferably any harvestable part of these plants.

[0071] Therefore the invention also relates to the use of these sequences, the full-length sequences and the homologues as targets for agrochemicals The invention encompasses the use of a nucleic acid as mentioned above or the protein encoded by said isolated nucleic acid as a target for an agrochemical compound, preferably, wherein the agrochemical compound is a herbicide.

[0072] Further, the invention relates to the use of these sequences to develop screening assays for the identification and/or development of agrochemicals. The invention encompasses a method for screening candidate agrochemical compounds comprising the use of any one or more of SEQ ID NO 1 to 785 or a homologue, functional fragment or derivative thereof or one or more of the proteins corresponding to SEQ ID NO 1 to 785 or a homologue, functional fragment or derivative thereof.

[0073] The present invention will be further illustrated by the following figures, wherein,

[0074] FIG. 1 shows the gene expression profiles obtained by quality-based clustering of all transcript tags monitored in a transcript profiling experiment as described in example 1. Shown are the trend lines of 16 clusters containing 97% of the genes and covering the entire time course as indicated on top. S-phase-specific gene clusters are grouped in A, gene clusters with peak expression between S- and M-phase are grouped in B, whereas group C contains the M- and G1-phase-specific clusters. D: Three small clusters of genes with peak expression during two cell cycle phases.

[0075] FIG. 2 shows the phenotypes of tobacco plants inoculated with a acetolactate synthase (SEQ ID NO 18) downregulation construct and phenotypes of tobacco plants inoculated with a prohibitin (SEQ ID NO 21) downregulation construct. The phenotypes were observed 12 days after inoculation (upper panel) or 17 days after inoculation (lower panel).

[0076] FIG. 3 shows the phenotype of tobacco plants inoculated with a B-type CDK (SEQ ID NO 11) donwregulation contruct. The observations were made 37 days after inoculation.

[0077] FIG. 4 shows the sequences identified by the methods of the present invention and represented by SEQ ID NO 1 to SEQ ID NO 785

### EXAMPLES

### Example 1

[0078] A cDNA-AFLP based expression profiling of sequence obtained from samples of a synchronized tobacco BY2 cell line system, was used to identify genes that are upregulated during the cell cycle, an essential biological process needed for the viability and growth of the tobacco cell line system.

[0079] A genome-wide expression analysis of cell cycle-modulated genes in the tobacco Bright Yellow-2 (BY2) cell line was performed. This unique cell line can be synchronized to high levels with different types of inhibitors of cell cycle progression (Nagata et al., Int. Rev. Cytol., 132 1-30, 1992; Planchais et al., FEBS Lett., 476 78-83, 2000). Because of the lack of extensive molecular resources such as genomic sequences, cDNA clones or expressed sequence tags (ESTs) for tobacco, a microarray-based approach cannot be used for a transcriptome analysis. Therefore, the cDNA-AFLP technology was used to identify and characterize cell cycle-modulated genes in BY2. cDNA-AFLP is a sensitive and reproducible fragment-based technology that has a number of advantages over other methods for genome-wide expression analysis (Breyne and Zabeau, Curr. Opin. Plant Biol., 4 136-142, 2001): it does not require prior sequence information, it allows identification of novel genes, and it provides quantitative expression profiles. After a detailed analysis, it was found that around 10% of the transcripts analyzed is periodically expressed. This comprehensive collection of plant cell cycle-modulated genes provides a basis for selecting and validating novel and unexpected agrochemical target genes

[0080] Synchronization of BY2 cells and sampling of material. Tobacco BY2-(Nicotiana tabacum L. cv. Bright Yellow-2) cultured cell suspension were synchronized by blocking cells in early S-phase with aphidicolin as follows. Cultured cell suspension of Nicotiana tabacum L. cv. Bright Yellow 2 were maintained as described (Nagata et al., Int. Rev. Cytol., 132 1-30, 1992). For synchronization, a 7-day-old stationary culture was diluted 10-fold in fresh medium supplemented with aphidicolin (Sigma-Aldrich, St. Louis, Mo.; 5 mg/l), a DNA-polymerase a inhibiting drug. After 24 h, cells were released from the block by several washings with fresh medium and resumed their cell cycle progression. After the drug had been washed, samples were taken every hour, starting from the release from the aphidicolin block (time 0) until 11 h later. The mitotic index was determined by counting the number of cells undergoing mitosis under fluorescence microscopy after the DNA had been stained with 5 mg/l 4′,6-diamidino-2-phenylindole (Sigma-Aldrich). DNA content was measured by flow cytometry. This was done as follows A subsample was used to check cell cycle progression and synchrony levels. After the DNA had been stained with 5 mg/l 4′,6-diamidino-2-phenylindole (Sigma-Aldrich), the mitotic index was determined under fluorescence microscopy by counting the number of cells undergoing mitosis. A mitotic peak of approximately 40% was obtained 8 h after washing. For flow cytometry, cells were first incubated in a buffered enzyme solution (2% cellulase and 0.1% pectolyase in 0.66 M sorbitol) for 20 min at 37° C. After the suspension had been washed and resuspended in Galbraith buffer (Galbraith et al., Science, 220 1049-1051, 1983), it was filtered through a 30-μm nylon mesh to purify the DAPI-stained nuclei. The fluorescence intensity was measured using a BRYTE HS flow cytometer (Bio-Rad, Hercules, Calif.). Exit from S-phase was observed 4 h after aphidicolin release and the level of synchrony was shown to be sufficiently high throughout the time course.

[0081] RNA extraction and cDNA synthesis. Total RNA was prepared by using LiCl precipitation (Sambrook et al., 1989) and poly(A⁺) RNA was extracted from 500 μg of total RNA using Oligotex columns (Qiagen, Hilden, Germany) according to the manufacturer's instructions. Starting from 1 μg of poly(A⁺) RNA, first-strand cDNA was synthesized by reverse transcription with a biotinylated oligo-dT₂₅ primer (Genset, Paris, France) and Superscript II (Life Technologies, Gaithersburg, Md.). Second-strand synthesis was done by strand displacement with Escherichia coli ligase (Life Technologies), DNA polymerase I (USB, Cleveland, Ohio.) and RNAse-H (USB).

[0082] cDNA-AFLP analysis. Five hundred ng of double-stranded cDNA was used for AFLP analysis as described (Vos et al., Nucl. Acids Res., 23 4407-4414, 1995; Bachem et al., Plant J., 9 745-753, 1996) with modifications. The restriction enzymes used were BstYI and MseI (Biolabs) and the digestion was done in two separate steps. After the first restriction digest with one of the enzymes, the 3′ end fragments were collected on Dyna beads (Dynal, Oslo, Norway) by means of their biotinylated tail, while the other fragments were washed away. After digestion with the second enzyme, the released restriction fragments were collected and used as templates in the subsequent AFLP steps. The adapters used were: for BstYI, 5′-CTCGTAGACTGCGTAGT-3′ and 5′-GATCACTACGCAGTCTAC-3′, and for MseI, 5′-GACGATGAGTCCTGAG-3′ and 5′-TACTCAGGACTCAT-3′; the primers for BstYI and MseI were 5′-GACTGCGTAGTGATC(T/C)N₁₋₂-3′ and 5′-GATGAGTCCTGAGTAAN₁₋₂-3′, respectively. For preamplifications, a MseI primer without selective nucleotides was combined with a BstYI primer containing either a T or a C as 3′ most nucleotide. PCR conditions were as described Vos et at., Nucl. Acids Res., 23 4407-4414, 1995). The obtained amplification mixtures were diluted 600-fold and 5 μl was used for selective amplifications using a P³³-labeled BstYI primer and the Amplitaq-Gold polymerase (Roche Diagnostics, Brussels, Belgium). Amplification products were separated on 5% polyacrylamide gels using the Sequigel system (Biorad). Dried gels were exposed to Kodak Biomax films as well as scanned in a phospholmager (Amersham Pharmacia Biotech, Little Chalfont, UK).

[0083] Quantitative measurements of the expression profiles and data analysis. Gel images were analyzed quantitatively with the AFLP-QuantarPro image analysis software (Keygene Nev., Wageningen, The Netherlands). This software was designed for accurate lane definition, fragment detection, and quantification of band intensities. All visible AFLP fragments were scored and individual band intensities were measured per lane. The obtained data were used to determine the quantitative expression profile of each transcript. The raw data were corrected for differences in total lane intensities, after which each individual gene expression profile was variance-normalized. This was done as follows.

[0084] The obtained raw data were first corrected for differences in total lane intensities which may occur due to loading errors or differences in the efficiency of PCR amplification with a given primer combination for one or more time points. The correction factors were calculated based on constant bands throughout the time course. For each primer combination, a minimum of 10 invariable bands was selected and the intensity values were summed per lane. Each of the summed values was divided by the maximal summed value to give the correction factors. Finally, all raw values generated by QuantarPro were divided by these correction factors.

[0085] Subsequently, each individual gene expression profile was variance-normalized by standard statistical approaches as used for microarray-derived data (Tavazoie et al., Nature Genet., 22 281-285, 1999). For each transcript, the mean expression value across the time course was subtracted from each individual data point after which the obtained value was divided by the standard deviation. A coefficient of variation (CV) was calculated by dividing the standard deviation by the mean. This CV was used to establish a cut-off value and all expression profiles with a CV less than 0.25 were considered as constitutive throughout the time course.

[0086] The Cluster and TreeView software (Eisen et al., PNAS, 95 14863-14868, 1998) was used for hierarchical, average linkage clustering. Quality-based clustering was done with a newly developed software program (De Smet et al., Bioinformatics 2002 May; 18(5): 735-46). This program is related to K-means clustering, except that the number of clusters does not need to be defined in advance and that the expression profiles that do not fit in any cluster are rejected. The minimal number of tags in a cluster and the required probability of genes belonging to a cluster were set to 10 and 0.95, respectively. With these parameters, 86% of all the tags were grouped in 21 distinct clusters.

[0087] Characterization of AFLP fragments. Bands corresponding to differentially expressed transcripts were isolated from the gel and eluted DNA was reamplified under the same conditions as for selective amplification. Sequence information was obtained either by direct sequencing of the reamplified polymerase chain reaction product with the selective BstYI primer or after cloning the fragments in pGEM-T easy (Promega, Madison, Wis.) or sequencing of individual clones. The obtained sequences were compared against nucleotide and protein sequences present in the publicly available databases by BLAST sequence alignments (Altschul et al., Nucl. Acids Res., 25 3389-3402, 1997). When available, tag sequences were replaced with longer EST or isolated cDNA sequences to increase the chance of finding significant homology. Based on the homology, transcript tags were classified in functional groups as shown in Table 1.

### Experimental Results

[0088] Identification and Characterization of Cell Cycle-Modulated Genes

[0089] Tobacco BY2 cells were synchronized by blocking cells in early S-phase with aphidicolin, an inhibitor of DNA polymerase a. After the inhibitor had been released, 12 time points with an 1-h interval were sampled, covering the cell cycle from S-phase until M-to-G1 transition. Flow cytometry and determination of the mitotic index showed that the majority of cells exit S-phase 4 h after release from blocking and that the peak of mitosis is reached at 8 h. From each time point, extracted mRNA was subjected to cDNA-AFLP-based transcript profiling.

[0090] Quantitative temporal accumulation patterns of approximately 10,000 transcript tags were determined and analyzed. In total, around 1,340 transcript tags were modulated significantly during the cell cycle. Hierarchical clustering of the expression profiles resulted in four large groups with the peak of expression in S-, early G2-, late G2-, or M-phase. Within each of these groups, several smaller clusters of genes with similar expression patterns could be distinguished. By quality-based clustering 21 different clusters were identified (see: http://www.plantgeneticsigenomics/CCMgenes). In agreement with the hierarchical clustering, the four largest clusters (clusters 1 to 4 in FIG. 1) correspond to the S-, early G2-, late G2-, and M-phases and together contain 65% of all the tags. An additional cluster (cluster 5 in FIG. 1C), not clearly separated in the hierarchical clustering, includes the genes with peak expression in G1-phase and contains another 5% of the tags. The remaining clusters are much smaller and most often (e.g., clusters 6, 9, 10, and 18) include genes with a narrow temporal expression pattern. In addition to these clusters, three small groups of genes displaying elevated expression during two cell cycle phases were distinguished also by quality-based clustering (FIG. 1D).

[0091] After the transcript tags had been sequenced, homology searches revealed that 36.5% of the tags were significantly homologous to genes of known functions, 13.1% of the tags matched a cDNA or genomic sequence without allocated function, whereas for 50.4% of the tags no homology with a known sequence was found. Genes of known function belong to diverse functional classes (Table 1) revealing that several biological processes are at least partially under temporal transcriptional control during the cell cycle in plants. In general, the observed transcript accumulation profiles and cell cycle specificity correlate well with the functional properties of the corresponding genes. It is interesting that the number of transcription factors with G2-phase specificity is high, which may be related with the induction of genes involved in M-phase-specific processes. The overrepresentation of RNA-processing genes in the M-phase might indicate that post-transcriptional regulation is involved in gene activity during mitosis. Because de novo transcription is severely reduced during mitosis (Gottesfeld et al., Trends Bioch. Sci., 22 197-202, 1997). RNA-processing could provide an alternative regulatory mechanism. Intriguingly, transcript tags with homology to a gene of unknown function are overrepresented in the M-phase as well (Table 1). The principal differences in cell cycle events between plants and other organisms occur during mitosis; therefore, the inventors believe that several of these transcripts correspond to still uncharacterised plant-specific genes triggering these events. Remarkably, several of the tags homologous to a publicly available sequence have no Arabidopsis homologue, indicating that, in addition to conserved genes, different plant species possess also unique sets of cell cycle-modulated genes. Although many of these tags may be too short to significantly match with an Arabidopsis sequence, analysis of longer cDNA clones corresponding to a subset of tags has revealed that approximately 25% of the sequences remain novel.

[0092] In Tables 1 to 4 a selection of 785 sequence tags are shown. This selection was based on the criterion if the tags were full length or that showed homology with genes known to be involved in the cell cycle (group 2 SEQ ID NOs 22 to 118), or on the criterion that they show homology with genes of unknown function (group 3 SEQ ID NOs 119 to 283) or on the criterion that the sequences showed no homology with the sequences in that existing databases (group 4 SEQ ID NOs 284-785). A first group (SEQ ID Nos 1 to 21) represent a smaller selection of tags which are used in the target validation method described in the present invention, more particularly, that were used in example 2.

[0093] The Core Cell Cycle Machinery

[0094] Several tags coincide with genes belonging to the core cell cycle machinery and exhibiting distinct expression profiles. Transcript tags from five B1- or B2-type cyclins as well as from a D2-type cyclin show mitotic accumulation and exhibit a narrow temporal expression profile, confirming previous studies (Mironov et al., Plant Cell, 11 509-521, 1999; Sorrell et al., Plant Physiol., 119 343-351, 1999). Based on the transcription patterns, the six A-type cyclins fall into three groups that sequentially appear during the cell cycle, adding new data to earlier observations (Reichheld et al., PNAS, 93 13819-13824, 1996). Two groups have quite a broad window of transcript accumulation; one group, homologous to A3-type cyclins, is expressed during S-phase and disappears during G2-phase and the other group, corresponding to A2-type cyclins comes up at mid S-phase and goes down during M-phase, except for one transcript that is specific for S-phase. The third group, containing an A1-type cyclin, has the same expression pattern as the B- and D2-type cyclins. Several tags derived from genes encoding the plant-specific B-type cyclin-dependent kinases (CDKs) were also identified. CDKB1 and CDKB2 peak at the G2-to-M transition, slightly before the mitotic cyclins as describe (Porceddu et al., J. Biol. Chem., 276 36354-36360, 2001). In contrast to what has been observed in partially synchronized alfalfa cell cultures (Magyar et at., Plant Cell, 9 223-235, 1997), the transcript levels of the tags homologous to a C-type CDK accumulate differentially during the cell cycle. The transcripts are present during late M-phase and early S-phase, suggesting that CDKC is active during the G1-phase.

[0095] In addition to these well-characterized cell cycle-regulatory genes, also several tags were identified herein derived from genes encoding transcription factors and protein kinases or phosphatases with a known or putative role in cell cycle control. One tag with a sharp peak of transcript accumulation 1 h before the B- and D-type cyclins corresponds to a 3R-MYB transcription factor. Recently, a 3R-MYB has been shown to activate B-type cyclins and other genes with a so-called M-phase-specific activator domain (Ito et al., Plant Cell, 13 1891-1905, 2001). Another tag peaking in M-phase is homologous to the CCR4 associated protein CAF. CAF forms a complex with CCR4 and DBF2, resulting in a transcriptional activator involved in the regulation of diverse processes including cell wall integrity, methionine biosynthesis and M-to-G1 transition (Liu et al., EMBO J., 16 5289-5298, 1997). A majority of the tags with similarity to protein kinases and phosphatases show M-phase-specific accumulation (Table 1). Although the true identity and putative cell cycle related function remains unclear for the majority, one is highly homologous to a dual-specificity phosphatase. This type of phosphatases plays a crucial role in cell cycle control in yeast and animals (Coleman and Dunphy, Curr. Opin. Cell Biol., 6 877-882, 1994). Another M-phase-specific tag is homologous to prohibitin. In the mammalian cell cycle, prohibitin represses E2F-mediated transcription via interaction with retinoblastoma (Rb), thereby blocking cellular proliferation (Wang et al., Oncogene, 18 3501-3510, 1999).

[0096] Protein degradation by the ubiquitin-proteasome pathway also plays an important role in the control of cell cycle progression at both G1-to-S transition and exit from mitosis. Although there is little evidence for cell cycle-modulated expression of the genes encoding the various components of the ubiquitin-proteasome complexes, some proteins accumulate in a cell cycle-dependent way (del Pozo and Estelle, Plant Mol. Biol., 44 123-128, 2000). Furthermore, several tags were isolated herein from genes encoding ubiquitin-conjugating enzyme (E3), ubiquitin-protein ligase (E2), and proteasome components with an M-phase-specific expression pattern. Another transcript tag that accumulates during late M-phase is similar to cathepsin B-like proteins, which are proteolytically active and degrade diverse nuclear proteins, including Rb (Fu et al., FEBS Lett., 421 89-93, 1998).

[0097] Whereas all the core cell cycle regulatory genes have been identified that control the G2-to-M transition for which the expression is known to be cell cycle modulated, genes such as Rb and E2F, controlling G1-to-S transition were not found. These genes were probably missed because the G1-to-S transition was not included in the present analysis, what is supported by the finding that the early targets of E2F, such as polymerase a and ribonucleotide reductase, are already present at high levels at the beginning of the time course.

[0098] Genes Involved in DNA Replication and Modification

[0099] In agreement with the studies performed in yeast and human fibroblasts, transcripts encoding proteins involved in DNA replication and modification accumulated during S-phase and exhibited broad temporal expression profiles. Different replication factors, DNA polymerase α, and the histones H3 and H4 are already present at the onset of the time course, indicating that they are induced before the time point of the aphidicolin arrest. Interestingly, most of the histones H1, H2A, and H2B appear somewhat later than H3 and H4, what might reflect that they are deposited into the nucleosomes after H3 and H4 (Luger et al., Nature, 389 251-260, 1997; Tyler et al., Nature, 402 555-560, 1999). The profile of the homologue of the anti-silencing function 1 (ASF1) protein is similar to that of the histones H3 and H4, in agreement with the fact that the three proteins are part of the replication-coupling assembly factor complex that mediates chromatin assembly (Tyler et al., Nature, 402 555-560, 1999). Genes encoding high-mobility group proteins reach the highest accumulation during late G2, consistent with the subsequent steps involved in the folding and structuring of the chromatin. Tags derived from genes encoding proteins involved in DNA modification, such as S-adenosyl-L-methionine (SAM) synthase and cytosine-5-methyl- transferase are found in the histone cluster. Tags from methionine synthase genes, which provide the precursor for SAM synthase, accumulate during M-phase, in contrast to yeast, where these genes are expressed during late S-phase (Spellman et al., Mol. Cell Biol., 9 3273-3297, 1998).

[0100] Genes involved in chromatin remodelling and transcriptional activation or repression have been identified as well. One gene is a histone deacetylase with highest transcript accumulation during the G2-phase and another belongs to the SNF2 family of chromodomain proteins with an M-phase-specific expression pattern. Interestingly, one tag corresponds to a mammalian inhibitor of growth 1 (p33-ING1) protein. The human ING1 protein has DNA-binding activity and might be involved in chromatin-mediated transcriptional regulation (Cheung and Li, Exp. Cell Res., 268 1-6, 2001). This protein accumulates during S-phase (Garkavtsev and Riabowel, Mol. Cell Biol., 17 2014-2019, 1997), what is in agreement with the expression profile we observed. The yeast homologues of ING1 are components of the histone acetyltransferase complex and show similarity to the Rb-binding protein 2 (Loewith et al., Mol. Cell Biol., 20 3807-3816, 2000). Another tag, homologous to the Arabidopsis MSI3 protein, follows a similar expression profile. MSI-like proteins are involved in the regulation of histone acetylation and deacetylation and in chromatin formation (Ach et al., Plant Cell, 9 1595-1606, 1997).

[0101] The expression profiles of the different ribonucleotide reductase (RNR) genes are more complex. One gene is already expressed at high levels at the beginning of the time course and its expression is restricted to the S-phase as described (Chabouté et al., Plant Mol. Biol., 38 797-806, 1998), whereas, in contrast, another one is highly expressed in S-phase and reappears at lower levels during M-phase and a third one is M-phase-specific. This latter expression profile has also been described for a RNR gene from Xenopus where the encoded protein appears to be involved in microtubulin nucleation (Takada et al., Mol. Cell Biol., 11 4173-4187, 2000).

[0102] Numerous other transcript tags with S-phase specificity were found in addition to the ones involved in DNA replication and modification. Most interestingly, one of these tags is homologous to a mammalian gene encoding a TRAF-interacting protein (TRIP), which is a component of the tumor necrosis factor (TNF) signaling complex, and promotes cell death when complexed with TRAF (Lee et al., J. Exp. Medicine, 185 1275-1285, 1997). Another S-phase-specific tag shows homology to the RING finger domain of inhibitor of apoptosis proteins, which are also involved in the TNF signaling pathway.

[0103] Modulated Expression of Genes Required for Mitosis and Cytokinesis

[0104] Several paralogous genes that encode either α- or β-tubulin were highly induced and accumulated prior to the mitotic index peak or during early M-phase. The inventors found that in BY2, tubulin genes are highly cell cycle modulated. This transcriptional regulation is in agreement with previous demonstrations of de novo transcription of α- and β-tubulin genes during different cellular processes (Stotz et al., Plant Mol. Biol., 41 601-614, 1999). In the present analysis, no γ-tubulin genes were found, confirming published data that the amount of γ-tubulin is constant in dividing BY2 cells (Stoppin-Mellet et al., Plant Biol., 2 290-296, 2000). Most of the kinesins identified herein, fall in the same cluster as the tubulins peaking prior to mitosis. Interestingly, two tags have a distinct transcription pattern and appear in another gene cluster. Their window of transcript accumulation is very narrow and coincides with the peak of mitosis. Most interestingly, these tags correspond to the plant-specific phragmoplast-associated type of kinesin, PAKRPI (Lee and Liu, Curr. Biol., 10 797-800, 2000). A chromokinesin not yet described in plants was identified as well. This type of motor proteins use DNA as cargo and play a role in chromosome segregation and metaphase alignment (Wang et al., J. Cell Biol., 128 761-768, 1995).

[0105] Among the M-phase-specific kinases, two were unambiguously recognized herein as playing a role in cytokinesis. One is Aurora, a protein kinase with a key role in the control of chromosome segregation, centrosome separation, and cytokinesis in yeast and animals (Bischoff and Plowman, Trends Cell Biol., 9 454-459, 1999) but not described in plants yet. The other is NRK1, a mitogen-activated protein kinase which is phosphorylated by NPK1, a kinase involved in regulating the outward redistribution of phragmoplast microtubules (Nishihama et al., Genes Dev., 15 352-363, 2001).

[0106] Hormonal Regulation and Cell Cycle-Modulated Gene Expression

[0107] A number of genes belonging to the class of auxin-induced genes were also differentially expressed. Cell cycle-modulated expression of auxin-induced genes has never been observed before although auxins together with cytokinins are the two major groups of plant hormones that affect cell division (Stals and Inzé, Trends Plant Sci., 6 359-364, 2001). The genes as identified herein fall into two groups based on their transcript accumulation profiles (data not shown). The first group displays an early S-phase-specific expression pattern and consists of the parA, parB and parC genes. Induction of the par genes is most often observed in response to stress conditions (Abel & Theologis, Plant Phys. 111, 9-17, 1996). The fact that the transcripts rapidly disappear after release from the cell cycle-blocking agent might indicate a stress response rather than a cell cycle dependent auxin response.

[0108] More interesting is the second group of genes with transcripts accumulating during early M-phase. This group includes the auxin response factor 1 (ARF1), an auxin transporter as well as different members of the early auxin response AUX/IAA gene family. ARF1 is a transcription factor that binds to a particular auxin response element (Ulmasov et al., Science, 276 1865-1868, 1997). Additional studies suggest that the activity of ARF1 is controlled by its dimerization with members of the AUX1/IAA family (Walker and Estelle, Curr. Opin. Plant boil., 1 434-439,1998). The similarity in temporal expression profiles the inventors observed supports these findings and suggests that these proteins mediate an auxin response necessary for cell cycle progression

[0109] By using tobacco BY2 as model system together with cDNA-AFLP-based transcript profiling, it is described herein for the first time how a comprehensive inventory of plant cell cycle-modulated genes can be made. Although the obtained data confirm earlier results and observations, in addition, numerous novel findings were made. The obtained data are a very useful basis for selecting and validating agrochemical target genes.

### Example 2

[0110] In this example it is described how plant genes are evaluated for assessment of their essential character in the biological process, thus how they are validated as good candidate targets for agrochemicals.

[0111] The Tobacco Rattle Virus (TVR) is used to induce silencing of target genes. In case of an essential gene the simlencing will result in a lethal effect on the plant and therefore, the suystem allows to validate good candidates as targets for herbicides.

[0112] The TRV based system is used in this example in combination with series of candidate genes, more particularly with the candidate targets as represented herein as group 1 sequences consisting of the SEQ ID NOs 1 to 21. The identification technique of the present invention (see example 1) allowed to identify new genes that are potential new herbicide targets, because of their putative function in various key processes crucial for cell life, their expression at a certain developmental stage crucial for cell life, their role in metabolism and/or maintenance of cell living state.

[0113] This example illustrates the validation of these candidate genes as novel targets for agrochemicals, via the technique of the virus-induced gene silencing (VIGS).

[0114] Gene Silencing Mechanism

[0115] The virus-induced gene silencing (VIGS) is a manifestation of an RNA-mediated defence mechanism that is related to post-transcriptional gene silencing (PTGS) in transgenic plants (Ratcliff et al., Plant J., 25 237-245, 2001). The method uses a vector with an infectious cDNA of tobacco rattle virus (TRV) modified (see below) to facilitate insertion of target sequences and modified for efficient infection of plants (e.g. tobacco). The vector mediates VIGS of endogenous genes in the absence of specific virus-induced symptoms.

[0116] The RNA-mediated defence is triggered by the virus vectors, and targets both the viral genome and the host gene corresponding to the insert. As a result, the symptoms in the infected plant are similar to loss-of-function mutants or reduced-expression mutants in the host gene. The presence of a negative growth phenotype suggests that the targeted gene is a potential herbicide target.

[0117] The process of constructing a virus vector and monitoring symptoms on infected plants is completed within a few weeks, such that virus-induced gene silencing (VIGS) provides a simple, rapid means of assigning function to genes that have been sequenced but are otherwise uncharacterized. The determination of new herbicide target genes is performed in a few weeks including gene cloning, transformation steps and tobacco plant analyses.

[0118] The TRV construct is shown to target host RNAs in the growing points of plants (Ratcliff et al., Plant J., 25 237-245, 2001) such as meristems and actively dividing cells.

[0119] It has been shown that this vector overcomes many of the problem features of PVX, TMV and TGMV. For example, the TRV vector induces very mild symptoms, infects large areas of adjacent cells and silences gene expression in growing points such as meristems and actively dividing cells. Infection of tobacco plants on the leaves with TRV based constructs will affect growth and development of upper parts of the infected leaves and allow screening for growth parameters.

[0120] Construction of TRV Vectors Used in the Validation Process of the Present Invention

[0121] TRV is a positive-strand RNA virus with a bipartite genome. Proteins encoded by RNA 1 are sufficient for replication and movement within the host plant, while proteins encoded by RNA 2 allow virion formation and nematode-mediated transmission between plants (reviewed by MacFarlane, J. Gen. Virol., 80 2799-2807,1999).

[0122] The downregulation system is composed of separate cDNA clones of TRV RNA 1 and RNA 2 under the control of cauliflower mosaic virus (CaMV) 35S promoters on the transferred T-DNA of plant binary transformation vectors.

[0123] The TRV RNA 1 construct (pBINTRA6) contains a full-length infectious cDNA clone in which the RNA polymerase ORF is interrupted by intron 3 of the Arabidopsis Col-0 nitrate reductase NIA1 gene (Wilkinson and Crawford, Mol. Gen. Genet., 239 289-297, 1993), necessary to prevent expression of a TRV-encoded protein that is toxic to E. coli. This vector has been given the internal reference number p3209.

[0124] The TRV RNA 2 construct (pTV00), contains a multiple cloning site (MCS), leaving only the 5′ and 3′ untranslated regions and the viral coat protein (Ratcliff et al., Plant Cell, 11 1207-1215, 1999). This vector has the internal reference number p3930 and contains a Gateway™ cassette and the gene of interest to be tested. The genes as presented in SEQ ID NO 1 to 21 are each cloned in this vector.

[0125] cDNAs were amplified using Gateway compatible primers and the cDNAs were entered into Entry Clones by BP recombination reactions. Subsequently the entry clones comprising the gene according to any one of SEQ ID NO 1 to 21 were checked via Bang restiction digest. The genes of interest were then entered into destination vectors by LR recombination reactions and the destination vectors were checked via ECORV restriction digestions. These expression clones were electroporated into the Argobacterium strain GV3101 agro and the plasmid pBintra6 was electroporated into pMP90 agro.

[0126] Inoculation

[0127] To inoculate plants, Agrobacterium cultures carrying pBINTRA6 (strain C58C1 RifR containing pMP90 plasmid) and pTV00 (strain GV3101 containing pMP90 plasmid) were grown and mixed and infiltrated to the leaves of Nicotiana benthamiana as previously described (English et al., Plant J., 12 597-603, 1997). Briefly, virus infection was achieved by Agrobacterium-mediated transient gene expression. Agrobacterium containing the TRV cloning vectors were grown overnight in L brith (+Tc+Km), Agrobacterium containing the helper plasmid was grown overnight in 10 ml YEB+Rif+Km. The culture was centrifuged and resuspended in 10 ml of 10 mM MgCl₂, 1 mM MES-pH5.6 and 100 μM acetosyringone and kept at room temperature for 2 h. Separate cultures containing pBINTRA6 and TRV cloning vectors were mixed in a ratio of 1:10. The culture was then infiltrated to the underside of two leaves of three-weeks old plants using a 2 ml syringe without a needle. In two independent experiments 6 plants per agroabcterium clone were infected. In this way the cloned genes (SEQ ID NO 1-21) were transferred into the cells of the infiltrated region, and could be transcribed into the viral cDNAs in the leave cells. These transcripts then serve as an inoculum to initiate systemic infection of the plant. Consequently the VIGS system is activated, resulting in the downregulation of the host cell gene, corresponding to the cloned gene of interest. All experiments involving virus-infected material was carried out in controlled growth chambers. N. benthamiana plants were germinated ad grown individually on universal potting ground in pots at 25° C. during the day (16 h) and 20° C. during the night (8 h).

[0128] The plants were phenotypically evaluated on a daily basis. Particular attention was given to visible leaf damage and growth inhibition. The effects of the suppression of gene activity using the VIGS system is measured by the phenotypic aspect of the plants, including leaf defects such as growth retardation, yellow or necrotic spots, early senescence, etc. The effects of the downregulation of genes identified by the methods of the invention are also measured on the flower structure and the flowering capacities of the transformed plants.

[0129] The severity of the phenotype is linked to the level of suppression of the geneactivity and indicates the degree in which the gene is essential for the plant Therefore the phenotype is an indication of the degree in which the gene is a valid target for a herbicide.

[0130] Phenotypes of the Infected Plants

[0131] 1. Co-suppression of the gene leads to loss of gene transcription and protein expression in the virus infected leaf and induces leaf growth modification, including leaf wrinkling, curling, wilting, leading to cell death and/or plant death.

[0132] 2. Co-suppression of the geneleads to loss of gene transcription and protein expression in the virus infected leaf and induces leaf yellowing or senescence, or cell death and necrosis, leading to plant death.

[0133] 3. Co-suppression of the gene leads to loss of gene transcription and protein expression in the virus infected leaf and induces any of the following phenotypic symptoms: chlorotic regions around infection, crisp or crunchy leaf texture around infection, numerous surface lumps on either leaf surface, abnormal trichomes, abnormal leaf size, reduced growth, reduced final size, altered vascular leaf system, altered water movement in leaf, leading to cell death and/or plant death.

[0134] 4. Co-suppression of the gene leads to loss of gene transcription and protein expression in the virus infected leaf and induces any of the following anatomical symptoms: clumps of modified cells on the surface of the leaf (either abaxial or adaxial), individual cells detached from the epidermis, swollen or modified trichome cells, modification of leaf tissue structure, cell size, cell number, tissue composition, parenchyme, epidermis, etc, leading to cell death and/or plant death.

[0135] 5. co-suppression of gene X leads to loss of gene transcription and protein expression in the virus infected leaf and induces any of the following biochemical symptoms, enzyme activity and products, degradation of leaf components and effects in neighboring leaves, stem, vascular system, degradation of cell wall structure, communication between cells, modification of cell-cell signaling leading to cell death and/or plant death.

[0136] The genes identified by the present invention can be utilized to examine herbicide tolerance mechanisms in a variety of plants cells, including gymnosperms, monocots and dicots. It is particularly useful in crop plant cells such as rice, corn, wheat, barley, rye, sugar beet, etc

### Example 3

[0137] Significant phenotypic alterations could be observed in plants infiltrated with Agrobacterium containing pBINTRA6+Bstt44-4-340 (SEQ ID NO 18, acetolactate synthetase) and pBINTRA6+Bstt2-42-520 (or T4-32-7) (SEQ ID NO 21, prohibitin) and pBINTRA6+Bstt230 (SEQ ID NO 11, B-type CDK).

[0138] At 10 days post-infiltration the first symptoms were visible. The symptoms were persistent until the end of the experiment and could be observed in at least 5 out of the 6 infiltrated plants.

[0139] The phenotypes of the plants transformed with acetolactate synthase are further described.

[0140] In two separate replicated experiments, specific phenotypes on each plant infected with the acetolactate synthetase downregulation construct were observed (FIG. 2). Winkling and wrapping of the leaves as well as some chlorotic spots were observed. Thus acetolactate downregulation provoked a general growth arrest accompanied with chlorotic and necrotic areas. These observations were in line with previous reports, wherein acetolactate synthetase is described as a useful herbicide target.

[0141] The phenotypes of the plants transformed with prohibitin are further described. In two separate replicated experiments, specific phenotypes on each plant infected with the prohibitin downregulation construct were observed (FIG. 2). These plants showed strong wrinkling of the leaves about 20 days after infection, corresponding to the expected occurrence of silencing events. Thus the downregulation of prohibitin provokes a severe leaf distortion and general growth arrest.

[0142] The phenotype of the plants inoculated with a B-type CDK downregulation construct are shown in FIG. 3. A late (from 30 days after inoculation) but strong negative effect on the plant growth was observed. The plants started to grow much slower and lost their apical dominance, resulting in the increased appearance of lateral branches.

TABLE 1
Functional classification of transcript tags

| | | S | | G2 | | M | | G1 |
|---|---|---|---|---|---|---|---|---|
| Function | Tags | 27.7% | | 15.8% | | 52.9% | | 3.6% |
| Cell cycle control | 30 | 5/8 | (0.078) | 8/5 | (0.068) | 14/16 | (0.114) | 3/1 |
| Cell wall | 35 | 6/10 | (0.047) | 4/6 | (0.136) | 25/18 | (7.1e⁻³) | 0/1 |
| Cytoskeleton | 43 | 1/12 | (1.2e⁻⁵) | 4/7 | (0.090) | 38/22 | (2.1e⁻⁷) | 0/2 |
| Hormone response | 13 | 6/4 | (0.113) | 1/2 | (0.277) | 6/7 | (0.185) | 0/0 |
| Kinases/phosphatases¹ | 27 | 4/8 | (0.039) | 1/4 | (0.059) | 19/14 | (0.025) | 3/1 |
| Protein synthesis | 50 | 15/14 | (0.116) | 5/8 | (0.087) | 29/26 | (0.079) | 1/2 |
| Proteolysis | 21 | 2/6 | (0.026) | 1/3 | (0.144) | 17/11 | (0.039) | 1/1 |
| Replication and modification | 74 | 57/20 | (4.2e⁻¹⁹) | 8/12 | (1.0e⁻⁵) | 8/39 | (1.0e⁻¹⁸) | 1/3 |
| RNA processing | 20 | 1/6 | (6.8e−3) | 1/3 | (0.137) | 18/11 | (8.1e⁻⁴) | 0/0 |
| Signal transduction | 10 | 1/3 | (0.121) | 3/2 | (0.201) | 6/5 | (0.205) | 0/0 |
| Stress response | 20 | 6/6 | (0.192) | 2/3 | (0.229) | 10/10 | (0.159) | 2/1 |
| Transcription factors | 27 | 4/8 | (0.039) | 10/4 | (3.0e⁻³) | 12/14 | (0.112) | 1/1 |
| Transport and secretion² | 31 | 5/9 | (0.047) | 2/5 | (0.076) | 21/16 | (0.031) | 3/1 |
| Unknown | 175 | 37/48 | (0.015) | 19/28 | (0.014) | 112/93 | (8.3e⁻⁴) | 7/6 |

The total number of tags and the observed/expected number of tags within the different cell cycle phases for each functional group is given together with the probability values between parentheses as calculated based on the binomial distribution function, except for the G1-phase because the values were too small. A significant enrichment (P < e⁻³) of tags of a functional group within a particular cell cycle phase is indicated in bold.
¹Only kinases and phosphatases with unknown biological function.
²Except small GTP-binding proteins, which are classified under signal transduction.

TABLE 2
overview of group 1 of sequences used for validation of candidate target genes

| SEQ ID NO | CDS NO | Tag Name | Function | Fase |
|---|---|---|---|---|
| 1 | 2216 | 18R1850_C4-32-33_1E2 | catalase | ?? |
| 2 | 2217 | Bstt2-31-215 | phytoene desasturase | ?? |
| 3 | 2218 | Bstc13-1-145 | L-ascorbate peroxidase | M-G1 |
| 4 | 2219 | Bstc21-4-280 | GTP-bindingprotein | M |
| 5 | 2220 | Bstc33-2-310 | vacuolarsortingreceptor | M |
| 6 | 2221 | Bstc4-34-170 | probable cinnamyl alcohol dehydrogenase | G1/S-S; M-G1 |
| 7 | 2222 | Bstt34-3-470 | kinesin | M |
| 8 | 2223 | Bstt12-3-410 | B-typeCDK | M |
| 9 | 2224 | Bstt14-3-458 | squalene mono-oxygenase | G1/S-S |
| 10 | 2225 | Bstt12-1-230 | kinesin-likeprotein | M |
| 11 | 2226 | Bstt23-4-230 | B-typeCDK | M |
| 12 | 2227 | Bstt2-42-225 | B-typeCDK | M |
| 13 | 2228 | Bstt31-4-208 | arabinogalactan protein precursor | G2/M-M |
| 14 | 2229 | Bstt 3-41-205 | arabinogalactan protein precursor | G2/M-M |
| 15 | 2230 | Bstt33-4-285 | chorismate synthase | S-G2 |
| 16 | 2231 | Bstt2-31-215 | kinesin-likeprotein | M |
| 17 | 2232 | Bstt41-2-400 | endo-beta-1,4glucanase | M |
| 18 | 2233 | Bstt44-4-340 | acetolactate synthase | G2/S-G2-M-G1 |
| 19 | 2234 | G17-2-13 G17-2-13 | WRKY transcription factor | ?? |
| 20 | 2235 | mapk9-ntf6.seq | mapkinase phragmoplast associated NTF6 | ?? |
| 21 | 2236 | Bstt2-42-520 | prohibitin | ?? |

TABLE 3
overview of group 2 sequences of full-length sequences that are cell cycle
modulated and of which some are involved in the cell cycle process

| SEQ ID | CDS | |
|---|---|---|
| NO | NO | Gene name |
| 22 | 0613 | Protein kinase mRNA, complete, N. tabacum, 2073 bp |
| 23 | 0614 | BY2 AA041K03 probable DNA-binding protein GBP16 - rice T02069, N. tabacum, 834 bp |
| 24 | 0615 | BY2 AA042C09 probable nuclear DNA-binding protein G2p [imported] in Arabidopsis T51151, N. tabacum, |
| | | 1185bp |
| 25 | 0616 | BY2-AA044J17 transcription regulator-like in Arabidopsis AB025604, N. tabacum, 1893 bp |
| 26 | 0617 | BY2 AA044J23 ATP-dependent RNA helicase CA3 of the DEAD/DEAH box family; Dbp3p; BY2- |
| | | AA044J23P19G01 RNA helicase RH5 in Arabidopsis T51739 N. tabacum, 1593 bp |
| 27 | 0618 | BY2-AA046C15 protein phosphatase 2C-like in Arabidopsis BAB08417 AB025622, N. tabacum, 732 bp |
| 28 | 0619 | BY2-AA047G13 14-3-3-like protein C P93343, N. tabacum, 70 bp |
| 29 | 0620 | BY2-AA054L09 protein kinase tousled in Arabidopsis A49318 N. tabacum, 2037 bp |
| 30 | 0621 | BY2-AA066H11P19H05 phosphoprotein phosphatase 2A regulatory chain T03684 N. tabacum, 1764 bp |
| 31 | 0622 | BY2-AA069L10 transcription factor-like protein in Arabidopsis BAB09482 AB012246, N. tabacum, 831 bp |
| 32 | 0623 | BY2-AA073K06 SET protein, phospatase 2A inhibitor in Arabidopsis AAG52377.1 AC011765, N. tabacum |
| 33 | 0624 | BY2-AA073MP19B07 phosphoprotein phosphatase 2A regulatory chain T03684, N. tabacum, 1764bp |
| 34 | 0625 | BY2-AA075H12 Putative phospatase 2A inhibitor in Arabidopsis AC011809_9 AC011809, N. tabacum, |
| | | 783bp |
| 35 | 0626 | BY2-AA076O02P19B08 hypothetical protein kinase in Arabidopsis T47727, N. tabacum, 2514 bp |
| 36 | 0627 | BY2-AA079J13 putative casein kinase I in Arabidopsis AAG51841.1 AC010926_4, N. tabacum, 1401 bp |
| 37 | 0628 | BY2-AA080G14 porin I 36K in potato S46959, N. tabacum, 393 bp |
| 38 | 0629 | BY2-AA081P13p21E02 separation anxiety protein-like in Arabidopsis CAB96669.1 AL360314, N. tabacum, |
| | | 492bp |
| 39 | 0630 | Complementary copy of 0630, N. tabacum, 975 bp |
| 40 | 0631 | BY2-AA085N17p21H04 14-3-3-like protein in potato 16R P93784 N. tabacum 768 bp |
| 41 | 0632 | BY2-AA087C16p21G03 AP2 domain transcription factor homolog in potato T07784 N. tabacum, 891 bp |
| 42 | 0633 | BY2-AA088B13 putative RING zinc finger protein in Arabidopsis CAB80936.1 AL161491 N. tabacum |
| | | 1248bp |
| 43 | 0634 | BY2-AA095M08 protein kinase homolog in Arabidopsis T02181 N. tabacum 858 |
| 44 | 0635 | BY2-AA096M07 peptidyl-prolyl cis-trans isomerase-like protein BAB10691.1 AB015468 N. tabacum |
| | | 450bp |
| 45 | 0636 | BY2-AA096M12 zinc finger protein-like in Arabidopsis BAB09106.1 AB017069 N. tabacum 1518 bp |
| 46 | 0637 | BY2-AA096M22 cell division-like protein in Arabidopsis T45963 N. tabacum 687 bp |
| 47 | 0638_1 | BY2-AA098B08p21D11 similarity to DAG protein in Arabidopsis BAA97063.1 AP000370 N. tabacum |
| | | 1146bp |
| 48 | 0638_2 | Icl_AA091G16p21F05 N. tabacum 891 bp |
| 49 | 0639 | BY2-AA109N15 GAMM1 protein-like in Arabidopsis BAB08430.1 AB017067 N. tabacum 888 bp, (MYG1) |
| | | FAMILY, proliferation associated |
| 50 | 0640 | Complementary copy of 0640 N. tabacum, 891 bp |
| 51 | 0641 | BY2-AA114N16 unknown protein in Arabidopsis BAB03019.1 AP001297; candidate tumor suppressor |
| | | p33 ING1 homolog in Homo sapiens N. tabacum 720 bp |
| 52 | 0642 | BY2-AA115P21p22D02 NAC2 Arabidopsis AAF09254.1 AF201456_1N. tabacum 699 bp |
| 53 | 0643 | BY2-AA119N11p22G04 serine/threonine-specific protein kinase-like protein BAB09338.1 AB016879 N. tabacum |
| | | 1293 bp |
| 54 | 0662 | BY2-AA041E04 >pir\|\|T06678 hypothetical protein T17F15.80 - Arabidopsis thaliana |
| 55 | 0663 | BY2-AA043A01 >gb\|AAD24540.1\|AF113545_1 (AF113545) vacuole-associated annexin VCaB42 |
| | | [Nicotiana tabacum] |
| 56 | 0664 | BY2-AA044C02 >dbj\|BAA02028.1\|(D11470) chloroplast elongation factor TuB(EF-TuB) [Nicotiana |
| | | tabacum] |
| 57 | 0665 | BY2-AA044L14 dbj\|BAA97319.1\|(AB020754) gene_id: MYN8.3~pir\|\|T02891~similar to unknown protein |
| 58 | 0666 | BY2-AA045P04p01G10 sp\|Q43681\|NLTP_VIGUN PROBABLE NONSPECIFIC LIPID-TRANSFER |
| | | PROTEIN AKCS9 |
| 59 | 0667 | BY2-AA046C08p19E02 dbj\|BAB30364.1\|(AK016659) putative [Mus musculus] |
| 60 | 0668 | BY2-AA046E06 pir\|\|T50556 stamina pistilloidia protein Stp [imported] - garden pea |
| 61 | 0669 | BY2-AA046G14 dbj\|BAB26082.1\|(AK009117) putative [Mus musculus] |
| 62 | 0670 | BY2-AA046H23 emb\|CAA98172.1\|(Z73944) RAB8A [Lotus japonicus] |
| 63 | 0671 | BY2AA048A05 gb\|AAD15504.1\|(AC006439) putativeAAA-type ATPase [Arabidopsis thaliana] |
| 64 | 0672 | BY2-AA049K03 dbj\|BAB24909.1\|(AK007240) putative [Mus musculus] |
| 65 | 0673 | BY2-AA051A10 dbj\|BAB02543.1\|(AP000417) mitotic checkpoint protein [Arabidopsis thaliana] |
| 66 | 0674 | BY2-AA051L22p19H03 gb\|AAD48948.1\|AF147262_11 (AF147262) contains similarity to Pfam family |
| | | PF00400-WD domain |
| 67 | 0675 | BY2-AA052E10 >gb\|AAF52905.1\|(AE003628) CG4968 gene product [Drosophila melanogaster] |
| 68 | 0676 | BY2-AA052F14 >gb\|AAF79819.1\|AC007396_20 (AC007396) T4O12.22 [Arabidopsis thaliana] |
| 69 | 0677 | BY2-AA052G16p19D04 >dbj\|BAB09843.1\|(AB005246) gene_id: MUP24.12~unknown protein |
| | | [Arabidopsis thaliana] |
| 70 | 0678 | BY2-AA052N17 >gb\|AAG42914.1\|AF327533_1 (AF327533) unknown protein [Arabidopsis thaliana] |
| 71 | 0679_1 | BY2-AA053C11.1 >dbj\|BAB22857.1\|(AK003561) putative [Mus musculus] |
| 72 | 0679_2 | BY2-AA053C11.2 >gb\|AAC62883.1\|(AC005397) hypothetical protein [Arabidopsis thaliana] |
| 73 | 0680 | BY2-AA062A09 >gb\|AAF01061.1\|AF189284_1 (AF189284) nucleolar G-protein NOG1 [Trypanosoma |
| | | brucei] |
| 74 | 0681 | BY2-AA062G03 >pir\|\|T02135 hypothetical protein F8K4.10 - Arabidopsis thaliana |
| 75 | 0682 | BY2-AA065E08 >pir\|\|T00795 hypothetical protein F24L7.13 - Arabidopsis thaliana |
| 76 | 0683 | BY2-AA072K18 >emb\|CAB40381.1\|(AJ010819) GrpE protein [Arabidopsis thaliana] |
| 77 | 0684 | BY2-AA075K12 >gb\|AAD31331.1\|AC007354_4 (AC007354) T16B5.4 [Arabidopsis thaliana] |
| 78 | 0685 | BY2-AA076N08 >dbj\|BAA94770.1\|(AP001859) ESTs AU082761(S5084) D42006 |
| 79 | 0686 | BY2-AA080D01 >gb\|AAF80646.1\|AC012190_2 (AC012190) Contains similarity to F28O16.19 a putative |
| | | translation initiation protein |
| 80 | 0687 | BY2-AA081P14 >gb\|AAD32777.1\|AC007661_14 (AC007661) unknown protein [Arabidopsis thaliana |
| 81 | 0688 | BY2-AA082H04p21F02 >dbj\|BAB10171.1\|(AB016880) gene_id: MTG10.12~pir\|\|T05795~strong similarity |
| | | to unknown |
| 82 | 0689 | BY2-AA082H06p21G04 >pir\|\|T09039 hypothetical protein F26K10.110 - Arabidopsis thaliana |
| 83 | 0690 | BY2-AA082M07p21B05 >dbj\|BAB01783.1\|(AB022215) gene_id: MCB17.19~unknown protein |
| | | [Arabidopsis thaliana] |
| 84 | 0691 | BY2-AA083B24p21C04 >dbj\|BAB08247.1\|(AB006698) gene_id: MCL19.6~unknown protein [Arabidopsis |
| | | thanliana) |
| 85 | 0692 | BY2-AA083C05p21D02 >gb\|AAH02924.1\|AAH02924 (BC002924) Unknown (protein for |
| | | IMAGE: 3956179) [Homo sapiens] |
| 86 | 0693 | BY2-AA085D08p21C05 >pir\|\|T47624 hypothetical protein T5N23.10 - Arabidopsis thaliana |
| 87 | 0694 | BY2-AA085F09p21H01 >gb\|AAF79503.1\|AC002328_11 (AC002328) F20N2.15 [Arabidopsis thaliana] |
| 88 | 0695 | BY2-AA085M15p21D04 >gb\|AAF97305.1\|AC007843_8 (AC007843) Unknown protein [Arabidopsis |
| | | thaliana] |
| 89 | 0696 | BY2-AA088K23p21G05 >gb\|AAG52001.1\|AC012563_11 (AC012563) unknown protein; 64612-65506 |
| | | [Arabidopsis thaliana] |
| 90 | 0697 | BY2-AA088L24p21A07 >gb\|AAD55292.1\|AC008263_23 (AC008263) Contains PF\|00249 Myb-like DNA- |
| | | binding domain. |
| 91 | 0698 | BY2-AA089F12p21H05 >gb\|AAD55274.1\|AC008263_5 (AC008263) Strong similarity to gb\|D21805 |
| | | calcium-dependent protein kinase |
| 92 | 0699 | BY2-AA089M17 >pir\|\|T02186 hypothetical protein F14M4.16 - Arabidopsis thaliana |
| 93 | 0700 | BY2-AA090J23p21G08 >pir\|\|T48545 hypothetical protein F14F18.30 - Arabidopsis thaliana |
| 94 | 0701 | BY2-AA092F12p21H06 >emb\|CAB46854.1\|(AJ388555) hypothetical protein [Canis familiaris] |
| 95 | 0702 | BY2-AA092L20p21E07 >gb\|AAD10646.1\|(AC005223) 45643 [Arabidopsis thaliana] |
| 96 | 0703 | BY2-AA093J23p21C11 >gb\|AAG51461.1\|AC069160_7 (AC069160) unknown protein [Arabidopsis |
| | | thaliana] |
| 97 | 0704 | BY2-AA093L18p21D09 >emb\|CAC15504.1\|(AJ297917) B2-type cyclin dependent kinase [Lycopersicon |
| 98 | 0705 | BY2-AA093M19 >gb\|AAG12535.1\|AC015446_16 (AC015446) Unknown protein [Arabidopsis thaliana] |
| 99 | 0706 | BY2-AA094B12p21F10 >dbj\|BAB02118.1\|(AP000381) contains similarity to unknown |
| 100 | 0707_1 | BY2-AA096G05p21A11 dbj\|BAB02118.1\|(AP000381) contains similarity to unknown |
| 101 | 0707_2 | Icl_AA094B12p21F10 |
| 102 | 0708 | BY2-AA097G22p21D10 >gb\|AAG60065.1\|AF337913_1 (AF337913) unknown protein [Arabidopsis |
| | | thaliana |
| 103 | 0709 | BY2-AA099F04 gb\|AAG52457.1\|AC010852_14 (AC010852) hypothetical protein; 12785-11538 |
| | | [Arabidopsis thaliana] |
| 104 | 0710 | BY2-AA099N08p21H09 gb\|AAK14411.1\|AC087851_3 (AC087851) unknown protein [Oryza sativa] |
| 105 | 0711 | Icl_AA100B09 ref\|NP_009820.1\|Ybr261cp [Saccharomyces cerevisiae] |
| 106 | 0712 | BY2-AA109N02 ref\|NP_002848.1\|peroxisomal farnesylated protein; Housekeeping gene 33 kD [Homo |
| | | sapiens |
| 107 | 0713 | BY2-AA114E09p22F02 pir\|\|T51434 hypothetical protein F2G14_10 - Arabidopsis thaliana |
| 108 | 0714 | BY2-AA115B14p22C02 dbj\|BAB08888.1\|(AB012243) gene_id: MIJ24.6~ref\|NP_013897.1~similar to |
| | | unknown protein |
| 109 | 0715 | BY2-AA115F08p22C04 >gb\|BY2-AAH03900.1\|AAH03900 (BC003900) Similar to hypothetical protein |
| | | 384D8_6 [Mus musculus] |
| 110 | 0716 | BY2-AA115L12p22G01 >gb\|AAF43925.1\|AC012188_2 (AC012188) Contains similarity to PIT1 from |
| | | Arabidopsis thaliana |
| 111 | 0717 | BY2-AA116L23p22E01 >dbj\|BAB01460.1\|(AP000731) gene_id: MCB17.21~unknown protein |
| | | [Arabidopsis thaliana] |
| 112 | 0718 | BY2-AA117B12p21G12 >sp\|O23708\|PSA2_ARATH PROTEASOME SUBUNIT ALPHA TYPE 2 (20S |
| | | PROTEASOME ALPHA SUBUNIT B) |
| 113 | 0719 | BY2-AA117E08p22A03 >pir\|\|F81195 conserved hypothetical protein NMB0465 [imported] Neisseria |
| 114 | 0720 | BY2-AA117O08p22E03 >dbj\|BAB01753.1\|(AP000603) gb\|BY2-AAD10646.1~gene_id: MRP15.12 |
| 115 | 0721 | BY2-AA118D23p22E02 >emb\|CAB89490.1\|(AJ277062) CRK1 protein [Beta vulgaris], cdc2 like kinase |
| 116 | 0722 | BY2-AA119D12p22H04 >dbj\|BAB01163.1\|(AP000410) gene_id: K10D20.9~unknown protein |
| | | [Arabidopsis thaliana] |
| 117 | 0723 | BY2-AA120G12 >gb\|BY2-AAB63649.1\|(AC001645) hypothetical protein [Arabidopsis thaliana] |
| 118 | 0724 | BY2-AA120G19p22D05 >gb\|BY2-AAF69547.1\|AC008007_22 (AC008007) F12M16.18 [Arabidopsis |
| | | thaliana] |

TABLE 4
overview of group 3 sequences that show homology
with proteins of unknown function

| SEQ | | | |
|---|---|---|---|
| ID NO | Tag name and | Function | Fase |
| 119 | Bstc1-11-320 | | M-G1 |
| 120 | Bstc1-12-255 | | G2/M-M-G1 |
| 121 | Bstc1-12-275 | | G2/M-M-G1 |
| 122 | Bstc1-13-143 | unknownprotein | G2/M-M-G1 |
| 123 | Bstc1-13-160 | unknownprotein | G2/M-M-G1 |
| 124 | Bstc11-3-190 | | M-G1 |
| 125 | Bstc11-3-215 | putativeprotein | G2/M-M-G1 |
| 126 | Bstc11-3-230 | | G1/S; M-G1 |
| 127 | Bstc11-3-300 | unknown | M-G1 |
| 128 | Bstc13-4-168 | hypotheticalprotein | S-G2 |
| 129 | Bstc13-4-290 | hypotheticalprotein | M-G1 |
| 130 | Bstc14-205 | | G2/S-G2 |
| 131 | Bstc1-43-107 | | G2/S-G2 |
| 132 | Bstc14-3-165 | unknown | M-G1 |
| 133 | Bstc1-43-250 | unknown | G2/M-M-G1 |
| 134 | Bstc1-43-310 | hypotheticalprotein | G2/M-M |
| 135 | Bstc21-2-270 | hypotheticalprotein | G2/M-M-G1 |
| 136 | Bstc2-21-182 | unknown | M-G1 |
| 137 | Bstc22-1-275 | unknownprotein | G2-M-G1 |
| 138 | Bstc2-22-100 | unknown | G2-G2/M |
| 139 | Bstc2-22-155 | | G2-M |
| 140 | Bstc2-22-240 | hypotheticalprotein | M |
| 141 | Bstc22-2-270 | | G1/S; M-G1 |
| 142 | Bstc2-23-135 | | G2/S-G2-M |
| 143 | Bstc2-23-220 | unknown | G2-M-G1 |
| 144 | Bstc22-4-215 | hypotheticalprotein | G2/M-M |
| 145 | Bstc2-31-280 | | G2/M-M-G1 |
| 146 | Bstc23-2-240 | unknown | M |
| 147 | Bstc23-2-330 | putativeprotein | M |
| 148 | Bstc23-2-370 | | G1/S-S; G2/M-M-G1 |
| 149 | Bstc2-32-400 | | G1/S-S; G2/M-M-G1 |
| 150 | Bstc23-3-270 | | G1/S-S; M-G1 |
| 151 | Bstc2-33-280 | unknownprotein | G1/S-S; M-G1 |
| 152 | Bstc2-34-120 | unknown | G2/M-M-G1 |
| 153 | Bstc23-4-300 | unknown | M |
| 154 | Bstc2-41-165 | | G1/S-S |
| 155 | Bstc2-42-100 | unknown | G1/S-S |
| 156 | Bstc2-43-210 | | M-G1 |
| 157 | Bstc31-185 | unknown | G2/M-M-G1 |
| 158 | Bstc3-12-145 | unknown | S-G2 |
| 159 | Bstc3-12-290 | unknown | G2/M-M-G1 |
| 160 | Bstc31-3-400 | unknown | G2/M-M-G1 |
| 161 | Bstc32-1-122 | unknown | M-G1 |
| 162 | Bstc3-21-125 | | G1/S-S; G2/M-M-G1 |
| 163 | Bstc32-2-150 | putativeprotein | G1/S-S; G2/M-M-G1 |
| 164 | Bstc32-4-193 | | |
| 165 | Bstc32-4-370 | | G1/S-S-G2/S; M-G1 |
| 166 | Bstc3-31-350 | putativeprotein | G1/S-S-G2/S |
| 167 | Bstc33-2-145 | hypotheticalprotein | G1/S-S; G2/M-M-G1 |
| 168 | Bstc3-33-350 | | G1/S-S |
| 169 | Bstc33-360 | putativeprotein | G2/M-M-G1 |
| 170 | Bstc33-4-270 | unknown | G2/M-M |
| 171 | Bstc3-41-270 | unknown | M-G1 |
| 172 | Bstc3-41-300 | | G2/M-M-G1 |
| 173 | Bstc3-41-360 | | G2/M-M-G1 |
| 174 | Bstc3-42-175 | | M-G1 |
| 175 | Bstc3-43-135 | | G1 |
| 176 | Bstc3-43-180 | | M-G1 |
| 177 | Bstc3-43-193 | unknown | G1/S-S; G2/M-M-G1 |
| 178 | Bstc3-43-287 | | G1/S-S |
| 179 | Bstc3-44-145 | | M-G1 |
| 180 | Bstc3-44-375 | putativeprotein | M-G1 |
| 181 | Bstc4-11-120 | hypotheticalprotein | G2/M-M-G1 |
| 182 | Bstc4-11-320 | unknown | M-G1 |
| 183 | Bstc42-3-115 | unknown | M-G1 |
| 184 | Bstc42-3-125 | putativeprotein | G2/M-M-G1 |
| 185 | Bstc4-23-210 | | M-G1 |
| 186 | Bstc42-4-225 | unknown | G1/S-S-G2 |
| 187 | Bstc4-32-115 | unknownprotein | G1/S-S; G2/M-M-G1 |
| 188 | Bstc4-32-185 | unknown | G1/S-S |
| 189 | Bstc4-32-190 | unknown | G2/M-M |
| 190 | Bstc4-32-270 | unknown | G2/S-G2-M |
| 191 | Bstc4-32-410 | | G1/S-S-G2-G2/M |
| 192 | Bstc4-34-250 | | G2/M-M-G1 |
| 193 | Bstc4-41-230 | putativeprotein | G2/M-M-G1 |
| 194 | Bstc4-43-113 | unknown | W1-G1 |
| 195 | Bstc44-3-125 | | G2/M-M |
| 196 | Bstt1-12-340 | unknown | G2/M-M |
| 197 | Bstt12-2-225 | | G1/S-S-G2 |
| 198 | Bstt1-22-330 | unknown | G2/M-M-G1 |
| 199 | Bstt12-2-420 | unknownprotein | G2/M-M-G1 |
| 200 | Bstt12-2-540 | hypotheticalprotein | G2/M-M-G1 |
| 201 | Bstt1-23-155 | | M-G1 |
| 202 | Bstt12-3-215 | hypotheticalprotein | G2/M-M-G1 |
| 203 | Bstt12-3-280 | unknown | G1/S-S-G2 |
| 204 | Bstt12-3-310 | hypotheticalprotein | G1/S-S |
| 205 | Bstt12-3-350 | | G1/S-S-G2-G2/M |
| 206 | Bstt1-24-205 | | G2/M-M-G1 |
| 207 | Bstt1-24-220 | | G1/S-S-G2 |
| 208 | Bstt1-31-170 | hypotheticalprotein | G2/M-M-G1 |
| 209 | Bstt1-31-215 | unknown | G2/M-M-G1 |
| 210 | Bstt13-210 | unknown | G2/M-M-G1 |
| 211 | Bstt14-4-310 | unknownprotein | G2/M-M-G1 |
| 212 | Bstt2-11-165 | unknown | G2/M-M-G1 |
| 213 | Bstt2-12-190 | | G1/S-S-G2 |
| 214 | Bstt21-4-150 | hypotheticalprotein | G1/S-S-G2/S |
| 215 | Bstt21-4-250 | | G1/S-S; G2/M-G1 |
| 216 | Bstt21-4-470 | | G2/M-M-G1 |
| 217 | Bstt22-1-170 | unknown | S-G2 |
| 218 | Bstt2-21-190 | unknown | G2/M-M |
| 219 | Bstt22-2-190 | unknown | G2/M-M-G1 |
| 220 | Bstt22-2-290 | hypotheticalprotein | G2/M-M-G1 |
| 221 | Bstt22-3-225 | | M |
| 222 | Bstt22-3-275 | unknown | G2/M-M |
| 223 | Bstt22-3-315 | TomatoEST | G2/M-M-G1 |
| 224 | Bstt22-3-370 | unknown | G2/M-M-G1 |
| 225 | Bstt22-3-390 | putativeprotein | G2/M-M-G1 |
| 226 | Bstt22-3-480 | | G2/M-M-G1 |
| 227 | Bstt23-1-140 | | S-G2-G2/M |
| 228 | Bstt23-120 | unknownprotein | G2/M-M-G1 |
| 229 | Bstt23-1-200 | | S-G2-M |
| 230 | Bstt2-31-300 | unknown | S |
| 231 | Bstt2-32-220 | | M |
| 232 | Bstt2-32-400 | hypotheticalprotein | G2/M-M-G1 |
| 233 | Bstt23-3-350 | unknown | G2-M |
| 234 | Bstt23-370 | unknown | G2/M-M-G1 |
| 235 | Bstt24-1-320 | | S-G2 |
| 236 | Bstt24-2-310 | | G2/M-M-G1 |
| 237 | Bstt2-43-210 | unknown | G2-M |
| 238 | Bstt2-43-240 | | S-G2/S |
| 239 | Bstt31-1-100 | hypotheticalprotein | G1/S-S-G2 |
| 240 | Bstt3-11-205 | | G1/S-S-G2 |
| 241 | Bstt31-1-250 | hypotheticalprotein | G2/M-M-G1 |
| 242 | Bstt31-1-430 | hypotheticalprotein | G2/M-M-G1 |
| 243 | Bstt3-12-360 | unknownprotein | G2/M-M |
| 244 | Bstt31-3-380 | | G1/S-S |
| 245 | Bstt31-4-420 | hypotheticalprotein | G2/M-M-G1 |
| 246 | Bstt32-180 | putativeprotein | G2-M-G1 |
| 247 | Bstt3-22-160 | PotatoEST/ | G1/S-S-G2 |
| | | hypotheticalprotein | |
| 248 | Bstt32-3-175 | unknown | G2/M-M |
| 249 | Bstt32-3-325 | unknown protein | G2/M-M-G1 |
| 250 | Bstt3-24-135 | unknown | G2/M-M-G1 |
| 251 | Bstt3-24-200 | | G2/M-M-G1 |
| 252 | Bstt3-31-215 | unknownprotein | G2/M-M-G1 |
| 253 | Bstt3-31-330 | unknown | G1/S-S-G2 |
| 254 | Bstt33-1-350 | unknown | G2/M-M-G1 |
| 255 | Bstt33-1-510 | putativeprotein | G2/M-M-G1 |
| 256 | Bstt33-3-220 | unknown | G2/M-M-G1 |
| 257 | Bstt33-3-245 | unknownprotein | G2/M-M-G1 |
| 258 | Bstt3-33-550 | hypotheticalprotein | G1/S-S; M-G1 |
| 259 | Bstt33-4-140 | putativeprotein | S-G2 |
| 260 | Bstt34-2-165 | unknown | G1/S-S-G2 |
| 261 | Bstt3-42-325 | hypotheticalprotein | G2/M-M-G1 |
| 262 | Bstt3-44-150 | unknown | G2/M-M-G1 |
| 263 | Bstt3-44-250 | unknown | G2/M-M-G1 |
| 264 | Bstt34-4-310 | unknown | G2/M-M-G1 |
| 265 | Bstt3-44-345 | hypotheticalprotein | G2/M-M-G1 |
| 266 | Bstt41-2-340 | | G2/M-M-G1 |
| 267 | Bstt41-3-310 | unknown | G2/M-M |
| 268 | Bstt4-21-185 | | M-G1 |
| 269 | Bstt42-1-370 | | S-G2-G2/M |
| 270 | Bstt4-23-480 | unknown | G2/M-M-G1 |
| 271 | Bstt4-24-170 | | G2/M-M-G1 |
| 272 | Bstt43-265 | unknown | G1/S-S-G2/M |
| 273 | Bstt43-3-350 | unknown | G2/M-M-G1 |
| 274 | Bstt4-33-390 | hypotheticalprotein | G1/S-S; G2/M-M-G1 |
| 275 | Bstt4-34-280 | | G2/M-M-G1 |
| 276 | Bstt43-4-300 | unknownprotein | G2/M-M-G1 |
| 277 | Bstt43-4-330 | unknownprotein | G2/M-M-G1 |
| 278 | Bstt43-4-340 | | G2/M-M-G1 |
| 279 | Bstt44-4-250 | hypotheticalprotein | G2/M-M |
| 280 | Bstt4-44-400 | hypotheticalprotein | G2/M-M-G1 |
| 281 | MBc03-90 | unknown | S-G2 |
| 282 | MBc42-180 | unknown | G2-M-G1 |
| 283 | MBc43-210 | unknown | G1/S-S-G2 |

TABLE 5
overview group 4 sequences showing no homology to known genes

| SEQ | | | |
|---|---|---|---|
| ID NO | Tag name | Function | Fase |
| 284 | Bstc1 1-100 | unknown | G2/S-G2-M |
| 285 | Bstc1 -11-110 | unknown | S |
| 286 | Bstc1 -11-115 | unknown | G1/S-S; G2/M-M-G1 |
| 287 | Bstc1 -11-120 | | G1/S-S-G2 |
| 288 | Bstc1 1-1-125 | unknown | G2/M-M-G1 |
| 289 | Bstc1 1-1-290 | NaD | G1/S; G2/M-M-G1 |
| 290 | Bstc1 -12-155 | | G2/S-G2-M |
| 291 | Bstc1 -12-175 | unknown | S |
| 292 | Bstc1 -12-185 | unknown | G2/M-M-G1 |
| 293 | Bstc1 1-3-116 | unknown | S-G2 |
| 294 | Bstc1 1-3-118 | unknown | G2/M-M-G1 |
| 295 | Bstc1 -13-120 | | S |
| 296 | Bstc1 -13-130 | | G1/S-S; G2/M-M-G1 |
| 297 | Bstc1 -13-132 | unknown | M-G1 |
| 298 | Bstc1 -13-142 | unknown | G1/S-S |
| 299 | Bstc 11-3-187 | unknown | S-G2/S |
| 300 | Bstc1 1-3-200 | unknown | G1/S-S-G2/S |
| 301 | Bstc1 1-3-290 | unknown | G2/S-G2-M-G1 |
| 302 | Bstc1 -14-100 | unknown | G2/M-M |
| 303 | Bstc1 -14-108 | unknown | G2/M-M-G1 |
| 304 | Bstc1 1-4-130 | unknown | G1/S-S-G2 |
| 305 | Bstc1 1-4-135 | unknown | G2/M-M-G1 |
| 306 | Bstc1 1-4-140 | unknown | S-G2-M |
| 307 | Bstc1 -14-155 | | G2/M-M |
| 308 | Bstc1 -14-165 | | G2-G2/M |
| 309 | Bstc1 -14-167 | | G2-G2/M |
| 310 | Bstc1 1-4-175 | | G2/M-M-G1 |
| 311 | Bstc1 1-4-200 | unknown | G1/S-S |
| 312 | Bstc1 2-1-110 | unknown | S-G2 |
| 313 | Bstc1 -21-150 | unknown | G2/M-M-G1 |
| 314 | Bstc1 2-1-160 | unknown | G2-M-G1 |
| 315 | Bstc1 2-1-240 | unknown | M-G1 |
| 316 | Bstc1 2-1-95 | unknown | G1/S-S-G2 |
| 317 | Bstc1 -22-110 | | G2-M-G1 |
| 318 | Bstc1 2-3-103 | unknown | G2/M-M-G1 |
| 319 | Bstc1 2-3-125 | unknown | G1/S-S; G1 |
| 320 | Bstc1 2-3-235 | | M-G1 |
| 321 | Bstc1 2-3-237 | unknown | G1/S-S |
| 322 | Bstc1 2-4-130 | unknown | G2/M-M-G1 |
| 323 | Bstc1 2-4-133 | unknown | S-G2 |
| 324 | Bstc1 2-4-145 | unknown | M-G1 |
| 325 | Bstc1 2-4-235 | unknown | G2/M-M-G1 |
| 326 | Bstc1 3-1-150 | | M-G1 |
| 327 | Bstc1 3-2-170 | unknown | G2/M-M-G1 |
| 328 | Bstc1 3-2-180 | unknown | G1/S-S |
| 329 | Bstc1 3-2-190 | unknown | G1/S-S |
| 330 | Bstc1 3-2-280 | unknown | G1/S-S; G2/M-M-G1 |
| 331 | Bstc1 -41-170 | unknown | G1/S-S |
| 332 | Bstc1 -41-175 | unknown | G1/S-S |
| 333 | Bstc1 -41-180 | unknown | G1/S-S; G2/M-M-G1 |
| 334 | Bstc1 -41-210 | unknown | G1/S-S |
| 335 | Bstc1 -41-230 | | G1/S; G2/M-M-G1 |
| 336 | Bstc1 4-2-140 | unknown | M-G1 |
| 337 | Bstc1 -42-150 | unknown | G2/S-G2 |
| 338 | Bstc1 -42-80 | unknown | G1/S-S-G2 |
| 339 | Bstc1 -42-90 | unknown | G2-M |
| 340 | Bstc1 -43-105 | | G2/M-M |
| 341 | Bstc1 4-3-105 | | G1/S-S; G2/M-M |
| 342 | Bstc1 -43-110 | | G1/S-S; G2-M |
| 343 | Bstc1 4-3-130 | unknown | G2/M-M-G1 |
| 344 | Bstc1 -43-140 | unknown | S-G2 |
| 345 | Bstc1 -43-150 | | G2/M-M-G1 |
| 346 | Bstc1 -43-175 | | S-G2 |
| 347 | Bstc1 -43-185 | unknown | G1/S-S-G2/S |
| 348 | Bstc1 4-3-235 | unknown | G1/S-S |
| 349 | Bstc1 4-3-260 | unknown | G2/M-M-G1 |
| 350 | Bstc1 -43-65 | unknown | G1/S-S-G2 |
| 351 | Bstc1 -43-75 | unknown | S-G2 |
| 352 | Bstc1 -44-138 | unknown | G1/S-S-G2/S |
| 353 | Bstc1 -44-140 | unknown | G2/S-G2-M |
| 354 | Bstc1 -44-157 | unknown | G2/S-G2 |
| 355 | Bstc1 4-95 | unknown | G2/M-M |
| 356 | Bstc2 1-1-100 | unknown | G2/M-M-G1 |
| 357 | Bstc2 1-1-140 | unknown | G1/S-S-G2 |
| 358 | Bstc2 1-1-145 | unknown | M-G1 |
| 359 | Bstc2 1-1-65 | unknown | G2-M-G1 |
| 360 | Bstc2 1-2-120 | | G2/M-M |
| 361 | Bstc2 1-2-215 | | G2/M-M |
| 362 | Bstc2 1-2-75 | | S-G2-M |
| 363 | Bstc2 -13-110 | | G1/S-S; G2/M-M |
| 364 | Bstc2 -14-100 | unknown | G2/M-M-G1 |
| 365 | Bstc2 1-4-120 | unknown | M-G1 |
| 366 | Bstc2 -14-125 | unknown | G2/M-M-G1 |
| 367 | Bstc2 1-4-130 | unknown | G2/M-M-G1 |
| 368 | Bstc2 -14-135 | unknown | S-G2/S |
| 369 | Bstc2 1-4-135 | | S-G2 |
| 370 | Bstc2 1-4-155 | unknown | G2/M-M-G1 |
| 371 | Bstc2 -14-160 | | M-G1 |
| 372 | Bstc2 1-4-180 | unknown | G2/S-G2 |
| 373 | Bstc2 2-100 | unknown | G2-M |
| 374 | Bstc2 -21-120 | unknown | G1/S-S |
| 375 | Bstc2 2-1-125 | unknown | S-G2 |
| 376 | Bstc2 -21-170 | unknown | M-G1 |
| 377 | B stc22-1-98 | unknown | S-G2-G2/M |
| 378 | Bstc2 2-2-110 | unknown | G2/M-M-G1 |
| 379 | Bstc2 -22-160 | unknown | G1/S-S; G2-G2/M |
| 380 | Bstc2 2-2-165 | unknown | G1/S-S |
| 381 | Bstc2 -22-90 | | S; G2-M |
| 382 | Bstc2 -23-110 | unknown | G2/M-M |
| 383 | Bstc2 -23-140 | | M-G1 |
| 384 | Bstc2 2-3-150 | | S-G2 |
| 385 | B stc2-23-175 | | M-G1 |
| 386 | Bstc2 -23-195 | unknown | M-G1 |
| 387 | Bstc2 2-3-90 | | M-G1 |
| 388 | Bstc2 -24-100 | unknown | G2/M-M-G1 |
| 389 | Bstc2 2-4-140 | | G1/S-S-G2-M |
| 390 | Bstc2 -24-165 | | G2/M-M |
| 391 | Bstc2 -24-170 | unknown | G1/S-S |
| 392 | Bstc2 -31-140 | unknown | G2/M-M-G1 |
| 393 | Bstc2 -31-160 | | M-G1 |
| 394 | Bstc2 -31-170 | unknown | M-G1 |
| 395 | Bstc2 3-2-135 | unknown | G2/M-M-G1 |
| 396 | Bstc2 -32-285 | | G2/M-M |
| 397 | Bstc2 3-2-360 | unknown | G1/S; G2/M-M-G1 |
| 398 | Bstc2 3-2-80 | unknown | G2/M-M |
| 399 | Bstc2 3-3-175 | unknown | G1/S-S-G2 |
| 400 | Bstc2 -33-200 | unknown | G2/M-M-G1 |
| 401 | Bs tc23-3-305 | unknown | M-G1 |
| 402 | Bstc2 -33-85 | | S-G2 |
| 403 | Bstc2 -33-95 | unknown | G2/M-M-G1 |
| 404 | Bstc2 3-4-110 | unknown | G2-M |
| 405 | Bstc2 3-4-120 | unknown | G1/S-S-G2 |
| 406 | Bstc2 3-4-310 | | S-G2 |
| 407 | Bstc2 3-4-335 | | G2-M-G1 |
| 408 | Bstc2 -41-110 | unknown | S-G2 |
| 409 | Bstc2 4-2-165 | | M-G1 |
| 410 | Bstc2 -43-105 | unknown | S-G2-G2/M |
| 411 | Bstc2 -43-130 | unknown | G2/M-M |
| 412 | Bstc2 4-3-285 | | G1 |
| 413 | Bstc2 -43-77 | unknown | G2/M-M-G1 |
| 414 | Bstc2 -43-90 | unknown | G2/M-M-G1 |
| 415 | Bstc2 4-4-125 | unknown | G1/S-S |
| 416 | Bstc2 -44-175 | unknown | G2/M-M-G1 |
| 417 | Bstc2 4-4-220 | | G2/M-M-G1 |
| 418 | Bstc2 4-4-230 | | G2-G2/M |
| 419 | Bstc2 -44-95 | unknown | M-G1 |
| 420 | Bstc3 1-110 | unknown | G1/S-S |
| 421 | Bstc3 1-1-250 | | G2/M-M |
| 422 | Bstc3 1-1-77 | | M-G1 |
| 423 | Bstc3 1-1-90 | unknown | M-G1 |
| 424 | Bstc3 -12-115 | unknown | M-G1 |
| 425 | Bstc3 1-2-190 | unknown | G1/S-S-G2 |
| 426 | Bstc3 1-3-127 | unknown | G1/S-S-G2/M |
| 427 | Bstc3 1-3-235 | unknown | S-G2 |
| 428 | Bstc3 -13-330 | | G1 |
| 429 | Bstc3 1-3-60 | unknown | G2-M |
| 430 | Bstc3 1-3-80 | unknown | S-G2-M-G1 |
| 431 | Bstc3 -13-90 | unknown | G2/M-M-G1 |
| 432 | Bstc3 -13-95 | unknown | M-G1 |
| 433 | Bstc3 -14-105 | unknown | M-G1 |
| 434 | Bstc3 -14-110 | unknown | M-G1 |
| 435 | Bstc3 -14-125 | unknown | G2/M-M-G1 |
| 436 | Bstc3 -14-130 | unknown | G1/S; M-G1 |
| 437 | Bstc3 2-1-108 | unknown | G1/S-S-G2 |
| 438 | Bstc3 2-1-170 | unknown | S-G2/S |
| 439 | Bstc3 -21-70 | unknown | M-G1 |
| 440 | Bstc3 2-2-100 | unknown | G1/S-S-G2 |
| 441 | Bstc3 2-2-270 | unknown | G1/S; G2/M-M-G1 |
| 442 | Bstc3 2-2-390 | unknown | G2/M-M-G1 |
| 443 | Bstc3 2-2-93 | unknown | G2/M-M |
| 444 | Bstc3 2-3-100 | unknown | S-G2 |
| 445 | Bstc3 -23-125 | unknown | G2/M-M-G1 |
| 446 | Bstc3 2-3-155 | | S-G2-M |
| 447 | Bstc3 -23-175 | unknown | G2/M-M-G1 |
| 448 | Bstc3 -23-177 | | G2/S-G2-M-G1 |
| 449 | Bstc3 2-3-63 | unknown | S-G2 |
| 450 | Bstc3 -23-65 | | S; G2-M-G1 |
| 451 | Bstc3 -24-155 | unknown | G2/M-M-G1 |
| 452 | Bstc3 2-4-230 | unknown | G2/M-M |
| 453 | Bstc3 2-4-250 | unknown | G2/M-M-G1 |
| 454 | Bstc3 -24-255 | unknown | G2/M-M-G1 |
| 455 | Bstc3 -24-305 | | G2-M-G1 |
| 456 | Bstc3 -24-340 | unknown | G1/S-S; M-G1 |
| 457 | Bstc3 -24-90 | | M-G1 |
| 458 | Bstc3 -31-130 | unknown | G1/S-S-G2 |
| 459 | Bstc3 3-120 | unknown | G1/S-S |
| 460 | Bstc3 -31-200 | | S-G2 |
| 461 | Bstc3 -31-260 | unknown | G1/S-S |
| 462 | Bstc3 3-150 | unknown | G2/M-M-G1 |
| 463 | Bstc3 -32-105 | unknown | G2-G2/M |
| 464 | Bstc3 -32-120 | | G1/S-S; G2/M-M-G1 |
| 465 | Bstc3 -32-240 | unknown | S-G2 |
| 466 | Bstc3 -32-320 | | G1/S-S-G2; M-G1 |
| 467 | Bstc3 3-280 | unknown | G2-M-G1 |
| 468 | Bstc3 3-2-90 | unknown | S-G2 |
| 469 | Bstc3 3-3-105 | unknown | G2/M-M-G1 |
| 470 | Bstc3 3-3-115 | | G1/S-S; M-G1 |
| 471 | Bstc3 3-3-165 | | G1/S-S-G2/S |
| 472 | Bstc3 -34-110 | | G2/M-M |
| 473 | Bstc3 3-4-165 | | G2/M-M |
| 474 | Bstc3 3-4-200 | | S |
| 475 | Bstc3 -34-290 | unknown | G2/M-M-G1 |
| 476 | Bstc3 -34-85 | unknown | G2-M-G1 |
| 477 | Bstc3 -34-90 | unknown | G1/S-S |
| 478 | Bstc3 3-90 | unknown | S |
| 479 | Bstc3 4-115 | | G2-M-G1 |
| 480 | Bstc3 -41-180 | | G2/M-M-G1 |
| 481 | Bstc3 4-13-300 | unknown | G/S-S; M-G1 |
| 482 | Bstc3 4-3-100 | | M-G1 |
| 483 | Bstc3 4-3-135 | | S-G2-G2/M |
| 484 | Bstc3 4-3-190 | | S-G2-M-G1 |
| 485 | Bstc3 -43-210 | unknown | G1/S-S; M-G1 |
| 486 | Bstc3 4-3-210 | unknown | G2/S-G2-G2-G2/M |
| 487 | Bstc3 -43-240 | | G1/S-S; G2/M-M-G1 |
| 488 | Bstc3 4-3-248 | unknown | S |
| 489 | Bstc3 4-3-263 | unknown | G2/M-M-G1 |
| 490 | Bstc3 -43-280 | unknown | G2/M-M-G1 |
| 491 | Bstc3 4-3-95 | unknown | S |
| 492 | Bstc3 -44-155 | unknown | G1/S-S; M-G1 |
| 493 | Bstc3 -44-173 | | G2/M-M-G1 |
| 494 | Bstc3 4-80 | unknown | S-G2/S |
| 495 | Bstc4 -11-117 | | G2/M-M-G1 |
| 496 | Bstc4 1-1-125 | unknown | M-G1 |
| 497 | Bstc4 1-1-130 | unknown | G2-M-G1 |
| 498 | Bstc4 -11-180 | | G2/M-M-G1 |
| 499 | Bstc4 1-1-195 | unknown | G1/S-S-G2 |
| 500 | Bstc4 1-1-197 | unknown | G2/M-M-G1 |
| 501 | Bstc4 -11-210 | unknown | G1/S-S-G2/S |
| 502 | Bstc4 1-1-210 | unknown | G1/S-S-G1/S |
| 503 | Bstc4 1-1-245 | unknown | M-G1 |
| 504 | Bstc4 -11-350 | unknown | G2/M-M |
| 505 | Bstc4 1-1-90 | unknown | G2/M-M-G1 |
| 506 | Bstc4 -12-150 | unknown | G2-M-G1 |
| 507 | Bstc4 1-2-280 | | S-G2-M |
| 508 | Bstc4 -13-112 | unknown | S-G2 |
| 509 | Bstc4 1-3-170 | unknown | G1/S-S |
| 510 | Bstc4 1-3-205 | unknown | G2/M-M-G1 |
| 511 | Bstc4 -13-280 | unknown | G1/S-S-G2/S |
| 512 | Bstc4 -13-70 | unknown | G2/M-M-G1 |
| 513 | Bstc4 1-4-105 | | M-G1 |
| 514 | Bstc4 1-4-112 | unknown | G2/M-M |
| 515 | Bstc4 -14-120 | unknown | G1/S-S; M-G1 |
| 516 | Bstc4 1-4-127 | unknown | S-G2-M |
| 517 | Bstc4 1-4-145 | unknown | G2/M-M-G1 |
| 518 | Bstc4 -14-160 | unknown | G2/M-M-G1 |
| 519 | Bstc4 1-4-165 | unknown | G2-M-G1 |
| 520 | Bstc4 1-4-185 | | G1/S-S-G2 |
| 521 | Bstc4 1-4-270 | | G1/S-S; G2/M-M-G1 |
| 522 | Bstc4 2-1-150 | unknown | G2/M-M-G1 |
| 523 | Bstc4 -21-155 | | G1/S-S-G2 |
| 524 | Bstc4 -21-200 | unknown | S; G2/M-M-G1 |
| 525 | Bstc4 2-135 | unknown | G2/M-M-G1 |
| 526 | Bstc4 -22-150 | unknown | G1/S-S; G1 |
| 527 | Bstc 42-2-170 | | S-G2-M |
| 528 | Bstc4 2-2-185 | | M-G1 |
| 529 | Bstc4 2-2-220 | unknown | M-G1 |
| 530 | Bstc4 2-3-100 | unknown | M-G1 |
| 531 | Bstc4 -23-115 | unknown | M-G1 |
| 532 | Bstc4 2-3-133 | | S-G2/S |
| 533 | Bstc4 -23-135 | unknown | G2/M-M-G1 |
| 534 | Bstc4 2-4-110 | unknown | G1/S-S; G2/M-M-G1 |
| 535 | Bstc4 -24-240 | | G1/S-S-G2 |
| 536 | Bstc4 -31-260 | | G2/M-M-G1 |
| 537 | Bstc4 -31-310 | unknown | S; G2/M-M-G1 |
| 538 | Bstc4 3-3-100 | | S-G2-M |
| 539 | Bstc4 3-3-103 | unknown | G2/M-M-G1 |
| 540 | Bstc4 3-3-135 | | M-G1 |
| 541 | Bstc4 3-3-175 | | G2/M-M-G1 |
| 542 | Bstc4 3-3-250 | unknown | M-G1 |
| 543 | Bstc4 -34-135 | unknown | G2/M-M-G1 |
| 544 | Bstc4 -34-185 | | G1/S-S |
| 545 | Bstc4 3-4-200 | unknown | G2/M-M-G1 |
| 546 | Bstc4 3-4-320 | | G1/S-S |
| 547 | Bstc4 -41-100 | unknown | G2-M |
| 548 | Bstc4 -41-105 | unknown | G1/S-S; G2/M-M-G1 |
| 549 | Bstc4 -41-107 | unknown | G2/M-M-G1 |
| 550 | Bstc4 -41-125 | unknown | M-G1 |
| 551 | Bstc 4-41-180 | | G2/M-M-G1 |
| 552 | Bstc4 -41-220 | unknown | M-G1 |
| 553 | Bstc4 4-150 | unknown | G2-M-G1 |
| 554 | Bstc4 -42-110 | unknown | G2/M-M-G1 |
| 555 | Bstc4 -42-115 | unknown | G2/M-M |
| 556 | Bstc4 -42-130 | unknown | S-G2 |
| 557 | Bstc4 -42-165 | unknown | G1/S-S; M-G1 |
| 558 | Bstc4 -42-217 | unknown | G2/M-M-G1 |
| 559 | Bstc4 -43-103 | unknown | G1/S-S-G2-G2/M |
| 560 | Bstc4 4-3-167 | unknown | G2/M-M-G1 |
| 561 | Bstc4 4-3-170 | | M-G1 |
| 562 | Bstc4 4-4-120 | unknown | M-G1 |
| 563 | Bstc4 4-4-290 | unknown | G2/M-M-G1 |
| 564 | Bstt1 -11-190 | | G1/S-S |
| 565 | Bstt1 -11-200 | unknown | G1/S-S-G2-G2/M |
| 566 | Bstt1 -11-55 | unknown | G1/S-S |
| 567 | Bstt1 -11-65 | unknown | G1/S-S-G2 |
| 568 | Bstt1 -12-105 | unknown | G2/M-M |
| 569 | Bstt1 -12-115 | | G1/S-S |
| 570 | Bstt1 -12-230 | | S-G2 |
| 571 | Bstt1 -13-150 | unknown | G2/M-M |
| 572 | Bstt1 -13-230 | unknown | G2/S-G2-M |
| 573 | Bstt1 -14-125 | unknown | G1/S-S |
| 574 | Bstt1 -14-220 | unknown | G2/M-M |
| 575 | Bstt1 -21-100 | unknown | G2/M-M |
| 576 | Bstt12 -1-240 | unknown | S-G2-M |
| 577 | Bstt1 -21-250 | unknown | S; G2/M-M-G1 |
| 578 | Bstt12 -2-100 | unknown | G2/S-G2-M-G1 |
| 579 | Bstt12 -2-140 | unknown | G2/M-M-G1 |
| 580 | Bstt1 -22-160 | | G2/M-G1 |
| 581 | Bstt12 -2-215 | unknown | G2/M-M |
| 582 | Bstt1 -22-225 | | M-G1-G1/S |
| 583 | Bstt12 -2-360 | unknown | G2/M-M-G1 |
| 584 | Bstt1 -22-70 | unknown | G1/S-S |
| 585 | Bstt12 -3-115 | unknown | G1/S-S-G2 |
| 586 | Bstt1 -23-150 | unknown | G2-M-G1 |
| 587 | Bstt1 -23-170 | unknown | G2-M |
| 588 | Bstt12 -3-170 | unknown | G1/S-S |
| 589 | Bstt1 -23-180 | unknown | G2/S-G2-M |
| 590 | Bstt1 -23-185 | | G2-M-G1 |
| 591 | Bstt1 -23-235 | unknown | G2-M |
| 592 | Bstt1 -24-105 | unknown | G2/S-G2-M-G1 |
| 593 | Bstt1 -24-120 | unknown | G2/M-M-G1 |
| 594 | Bstt12 -4-260 | | G2/S-G2-G2/M |
| 595 | Bstt12 -4-320 | | G2/M-M |
| 596 | Bstt1 -31-120 | | G2/M-M-G1 |
| 597 | Bstt1 -31-180 | unknown | G2/M-M-G1 |
| 598 | Bstt13 -170 | unknown | G1/S-S-G2 |
| 599 | Bstt13 -2-150 | | G1/S-S-G2 |
| 600 | Bstt1 -32-170 | unknown | G1/S-S-G2 |
| 601 | Bstt1 -32-185 | | G1/S-S |
| 602 | Bstt13 -3-100 | unknown | G1/S-S-G2-M |
| 603 | Bstt1 -33-170 | unknown | G1/S-S-G2 |
| 604 | Bstt13 -3-320 | unknown | G2/M-M-G1 |
| 605 | Bstt1 -33-66 | | G2/M-M |
| 606 | Bstt1 -41-120 | unknown | G2/M-M |
| 607 | Bstt1 -42-264 | unknown | G2-M-G1 |
| 608 | Bstt14 -2-280 | unknown | G2/M-M-G1 |
| 609 | Bstt14 -3-120 | | S-G2 |
| 610 | Bstt14 -3-140 | unknown | G1-S-S-G2 |
| 611 | Bstt1 -43-220 | unknown | G2/S-G2-G2/M |
| 612 | Bstt1 -43-330 | unknown | G2/M-M-G1 |
| 613 | Bstt14 -3-460 | unknown | G2/M-M |
| 614 | Bstt14 -4-130 | unknown | S-G2 |
| 615 | Bstt14 -4-150 | unknown | G2 |
| 616 | Bstt14 -4-195 | | S-G2-M |
| 617 | Bstt14 -4-220 | | G2/S-G2-G2/M |
| 618 | Bstt14 -85 | nohits | G2/M-M |
| 619 | Bstt21 -1-170 | unknown | G2/M-M |
| 620 | Bstt2 -11-290 | | G2/S-G2-G2/M |
| 621 | Bstt2 -11-540 | | G1/S-S |
| 622 | Bstt21 -2-190 | | G2/M-M-G1 |
| 623 | Bstt2 -13-165 | | S-G2-M |
| 624 | Bstt2 -13-170 | unknown | G2/M-M |
| 625 | Bstt2 -14-130 | unknown | G2/M-M |
| 626 | Bstt2 -14-175 | unknown | S-G2 |
| 627 | Bstt22 -1-140 | unknown | S-G2 |
| 628 | Bstt2 -21-300 | unknown | G2/M-M |
| 629 | Bstt22 -2-110 | unknown | G1/S-G2 |
| 630 | Bstt22 -2-255 | | G1/S-S-G2-G2/M |
| 631 | Bstt22 -2-370 | | G1/S-G2 |
| 632 | Bstt22 -3-100 | unknown | G2/M-M-G1 |
| 633 | Bstt22 -3-145 | unknown | G2/M-M-G1 |
| 634 | Bstt2 -23-220 | unknown | G2-M-G1 |
| 635 | Bstt2 -23-370 | | G1/S-G2 |
| 636 | Bstt22 -4-145 | unknown | G2/M-M |
| 637 | Bstt22 -4-170 | | S-G2 |
| 638 | Bstt22 -4-175 | | G2-M |
| 639 | Bstt22 -80 | unknown | G2/M-M |
| 640 | Bstt23 -1-128 | unknown | S-G2 |
| 641 | Bstt23 -1-155 | unknown | S-G2-G2/M |
| 642 | Bstt2 -31-200 | unknown | G2/S-G2 |
| 643 | Bstt23 -170 | unknown | G2/M-M-G1 |
| 644 | Bstt2 -32-175 | unknown | G2/S-G2-G2/M |
| 645 | Bs tt23-220 | | G1/S-S-G2 |
| 646 | Bstt23 -3-200 | | G1/S-S-G2/S |
| 647 | Bstt23 -3-265 | | S-G2-G2/M |
| 648 | Bstt23 -3-330 | | G1/S-S |
| 649 | Bstt2 -34-170 | unknown | G2/M-M-G1 |
| 650 | Bstt23 -4-180 | | S-G2-M |
| 651 | Bstt23 -4-210 | | G2/M-M-G1 |
| 652 | Bstt2 -41-170 | unknown | G1/S-S-G2 |
| 653 | Bstt24 -1-170 | unknown | S-G2 |
| 654 | Bstt2 -41-390 | | S-G2 |
| 655 | Bstt2 -42-300 | | G2/M-M-G1 |
| 656 | Bstt24 -2-318 | | S-G2 |
| 657 | Bstt24 -2-320 | unknown | G2/M-M-G1 |
| 658 | Bstt24 -290 | unknown | G2/M-M |
| 659 | Bstt2 -43-150 | | S-G2 |
| 660 | Bstt2 -43-160 | | S-G2/S |
| 661 | Bstt2 -43-50 | | S |
| 662 | Bstt2 -43-65 | unknown | S-G2 |
| 663 | Bstt2 -44-230 | | G2/S-G2-M |
| 664 | Bstt2 -44-240 | unknown | G1/S-S-G2 |
| 665 | Bstt24 -4-240 | unknown | G1/S-S-G2/S |
| 666 | Bstt24 -4-260 | unknown | G1/S-S |
| 667 | Bstt24 -4-283 | unknown | G1/S-S-G2 |
| 668 | Bstt24 -4-285 | unknown | G2/M-M-G1 |
| 669 | Bstt31 -1-145 | | S-G2-M |
| 670 | Bstt31 -1-210 | | G2/M-M-G1 |
| 671 | Bstt31 -2-165 | unknown | G2/S-G2 |
| 672 | Bstt31 -2-185 | | G2/M-M-G1 |
| 673 | Bstt3 -12-200 | unknown | G2/M-M-G1 |
| 674 | Bstt3 -12-315 | | S-G2-M |
| 675 | Bstt31 -2-330 | | G2/M-M-G1 |
| 676 | Bstt3 -13-110 | unknown | S-G2-G2/M |
| 677 | Bstt31 -3-180 | | S-G2-G2/M |
| 678 | Bstt3 -13-360 | | G2/M-M |
| 679 | Bstt3 -14-130 | unknown | G2/M-M |
| 680 | Bstt3 -14-135 | unknown | G2/M-M |
| 681 | Bstt31 -50 | unknown | G1/S-S-G2-G2/M |
| 682 | Bstt32 -1-105 | | S-G2 |
| 683 | Bstt3 -21-165 | | G2/S-G2 |
| 684 | Bstt3 -21-305 | unknown | G2/M-M |
| 685 | Bstt32 -140 | unknown | S-G2/S |
| 686 | Bstt3 -22-100 | | G2/M-M-G1 |
| 687 | Bstt32 -2-210 | | S-G2-M |
| 688 | Bstt3 -22-280 | unknown | G1/S-S; M-G1 |
| 689 | Bstt32 -2-510 | unknown | S-G2-G2/M |
| 690 | Bstt32 -3-115 | | G2/S-G2 |
| 691 | Bstt32 -3-155 | unknown | S-G2 |
| 692 | Bstt32 -3-160 | | M |
| 693 | Bstt32 -3-180 | unknown | G1/S-S-G2 |
| 694 | Bstt3 -23-205 | unknown | S-G2-M |
| 695 | Bstt3 -23-65 | unknown | G2/M-M-G1 |
| 696 | Bstt32 -4-170 | unknown | S; M |
| 697 | Bstt32 -4-195 | | G1/S-S; G2/M-M-G1 |
| 698 | Bstt32 -4-260 | unknown | G1/S-S |
| 699 | Bstt3 -24-390 | | M-G1 |
| 700 | Bstt33 -1-105 | | G1/S-S-G2 |
| 701 | Bstt33 -1-128 | | S-G2 |
| 702 | Bstt33 -1-132 | unknown | G2/M-M |
| 703 | Bstt33 -1-160 | unknown | G2/M-M-G1 |
| 704 | Bstt33 -1-185 | | M-G1 |
| 705 | Bstt33 -140 | unknown | G2/M-M-G1 |
| 706 | Bstt33 -2-75 | unknown | G1/S-S-G2 |
| 707 | Bstt33 -2-85 | | G1/S-S; G2/M-G1 |
| 708 | Bstt33 -3-110 | | G1/S-S; G2/M-M-G1 |
| 709 | Bstt33 -3-125 | unknown | G2/M-M-G1 |
| 710 | Bstt3 -33-170 | unknown | S-G2/S |
| 711 | Bstt33 -4-110 | | S-G2 |
| 712 | Bstt33 -4-120 | unknown | G1/S-S-G2 |
| 713 | Bstt33 -4-130 | unknown | G2/M-M |
| 714 | Bstt33 -95 | unknown | G2/M-M |
| 715 | Bstt34 -1-110 | | S-G2-G2/M |
| 716 | Bstt34 -1-170 | | G1/S-S-G2-G2/M |
| 717 | Bstt3 -42-350 | unknown | G2/M-M-G1 |
| 718 | Bstt3 -43-145 | unknown | G2/M-M-G1 |
| 719 | Bstt3 -43-190 | unknown | G1/S-S; M-G1 |
| 720 | Bstt3 -43-265 | | G2/S-G2-M-G1 |
| 721 | Bstt3 -43-280 | unknown | G2/M-M-G1 |
| 722 | Bstt34 -70 | unknown | S |
| 723 | Bstt41 -3-100b | unknown | G2/M-M |
| 724 | Bstt41 -3-130 | unknown | G2/M-M-G1 |
| 725 | Bstt41 -3-140 | unknown | G2/M-M-G1 |
| 726 | Bstt41 -3-180 | | G2-M |
| 727 | Bstt41 -3-230 | unknown | S-G2 |
| 728 | Bstt41 -3-90 | unknown | G2/M-M-G1 |
| 729 | Bstt41 -4-210 | unknown | S-G2-M-G1 |
| 730 | Bstt4 -14-500 | | G2/M-M-G1 |
| 731 | Bstt41 -70 | unknown | G1/S-S |
| 732 | Bstt42 -1-130 | unknown | G2/M-M-G1 |
| 733 | Bstt42 -1-290 | unknown | G2/M-M |
| 734 | Bstt4 -21-60 | unknown | S-G2 |
| 735 | Bstt4 -22-100 | | M-G1 |
| 736 | Bstt4 -22-360 | | S-G2 |
| 737 | Bstt42 -3-105 | unknown | G1/S-S-G2/S |
| 738 | Bstt42 -3-110 | unknown | G2/M-M-G1 |
| 739 | Bstt4 -23-130 | | S-G2/M |
| 740 | Bstt4 -23-160 | | G2/S-G2-M |
| 741 | Bstt42 -4-150 | unknown | G1/S-S-G2 |
| 742 | Bstt4 -24-270 | unknown | G2/M-M-G1 |
| 743 | Bstt42 -4-390 | unknown | M-G1 |
| 744 | Bstt43 -1-290 | unknown | G2/M-M-G1 |
| 745 | Bstt43 -1-85 | | G1/S-S-G2/S |
| 746 | Bstt4 -32-230 | unknown | G1/S-S-G2/S |
| 747 | Bstt43 -2-238 | | G2/M |
| 748 | Bstt43 -3-145 | unknown | G1/S-S-G2 |
| 749 | Bstt43 -3-210 | | G2/M-M-G1 |
| 750 | Bstt43 -4-230 | unknown | G2/M-M-G1 |
| 751 | Bstt4 -34-75 | unknown | G2/S-G2-M |
| 752 | Bstt44 -1-125 | unknown | S-G2-G2/M |
| 753 | Bstt44 -185 | unknown | M-G1 |
| 754 | Bstt44 -2-135 | | G2/M-M-G1 |
| 755 | Bstt4 -42-150 | unknown | M |
| 756 | Bstt4 -42-390 | unknown | M-G1 |
| 757 | Bstt44 -3-240 | unknown | G2/M-M-G1 |
| 758 | Bstt44 -3-250 | unknown | S-G2-G2/M |
| 759 | Bstt4 -44-148 | | G2/M-M-G1 |
| 760 | M Bc02-100 | unknown | G2/M-M |
| 761 | M Bc02-120 | unknown | G2/M-M |
| 762 | M Bc03-110 | unknown | G2/M-M |
| 763 | M Bc03-85 | | G2/M-M |
| 764 | M Bc11-135 | unknown | G2-M |
| 765 | M Bc12-150 | | S-G2-M |
| 766 | M Bc31-185 | unknown | G2/M-M |
| 767 | M Bc32-107 | unknown | G2/M-M-G1 |
| 768 | M Bc32-110 | unknown | G2/M-M-G1 |
| 769 | M Bc41-110 | unknown | G1/S-S; G2/M-M |
| 770 | M Bc42-280 | unknown | G2-M |
| 771 | M Bc43-95 | unknown | G2-M |
| 772 | M Bc44-130 | | S-G2 |
| 773 | M Bc44-95 | unknown | G2/M-M |
| 774 | M Bt12-80 | unknown | G2/M-M |
| 775 | M Bt12-95 | | M |
| 776 | M Bt13-105 | unknown | M-G1 |
| 777 | M Bt14-100 | unknown | G2/M-M-G1 |
| 778 | M Bt14-85 | unknown | S-G2-M |
| 779 | M Bt14-90 | unknown | G2-M |
| 780 | M Bt31-95 | | S-G2-M |
| 781 | M Bt33-115 | | G2/M-M-G1 |
| 782 | M Bt33-133 | | G2-M |
| 783 | M Bt42-135 | unknown | G2-M |
| 784 | M Bt43-95 | unknown | G2-G2/M |
| 785 | M Bt44-145 | unknown | G1/S-S-G2-M |

The application's sequence listing, which the Patent Office published only in electronic form, follows.

SEQUENCE LISTING (791 sequences)

SEQ ID NO: 1 - DNA, 234 bp, Nicotiana tabacum
gaattcactagtgattgatgagtcctgagtaaggtgagacgagaagcgaccttctgaccacaagacttgtcagcctgagacaggtatgatatccatatactgcgtatctcataagtgactcgtggatcggataaatgctcaacccatttgctaacatatctgtcttgcctgtcaggttcccaggatcactacgcagtcaatcgaattcccgcggcctatagtgagtcgtattaa

SEQ ID NO: 2 - DNA, 216 bp, Nicotiana tabacum
tgactgcgtagtgatctcaaagaagtggaagttacgagtgctcgagatgtgatgcagcagcttcttcagggtgctgcaaacagaaaggtagctgcaaccaacatgaatcgtgctagtagccgttcacacagtgtttttacatgtgtgatagagagcaaatgggaatctcaaggagtaactcaccaccggtttgctcgtcttactcaggactcatca

SEQ ID NO: 3 - DNA, 104 bp, Nicotiana tabacum
  misc_feature (2)..(3): N = G, C, A or T
  misc_feature (13)..(13): N = G, C, A or T
  misc_feature (27)..(27): N = G, C, A or T
  misc_feature (33)..(33): N = G, C, A or T
  misc_feature (36)..(36): N = G, C, A or T
  misc_feature (50)..(50): N = G, C, A or T
  misc_feature (59)..(59): N = G, C, A or T
  misc_feature (66)..(66): N = G, C, A or T
  misc_feature (69)..(69): N = G, C, A or T
  misc_feature (75)..(75): N = G, C, A or T
  misc_feature (89)..(89): N = G, C, A or T
gnnatgcccgatntaagccgcccctanatacanttnaaatggtcccgganaccctgggngacaatnatngactgngcagtggttgaagnttgacaattcctatt

SEQ ID NO: 4 - DNA, 216 bp, Nicotiana tabacum
  misc_feature (2)..(2): N = G, C, A or T
  misc_feature (4)..(4): N = G, C, A or T
  misc_feature (8)..(8): N = G, C, A or T
  misc_feature (10)..(10): N = G, C, A or T
  misc_feature (36)..(36): N = G, C, A or T
  misc_feature (65)..(65): N = G, C, A or T
cncnattntnaataagcccgaaaaagaagaagtaanggagggagaaggcctgaagagaatttgcnggattttctagagttgatacagaagttcttccaaactgttccaccttggattatgacaagtagtgtcaccaaccaaggtcgagatgagatactgttgcacatgtctcagctgcgaaactattggctcaagcattgagttggcatcatatga

SEQ ID NO: 5 - DNA, 264 bp, Nicotiana tabacum
  misc_feature (6)..(6): N = G, C, A or T
  misc_feature (8)..(8): N = G, C, A or T
  misc_feature (11)..(11): N = G, C, A or T
  misc_feature (20)..(20): N = G, C, A or T
  misc_feature (35)..(35): N = G, C, A or T
  misc_feature (117)..(117): N = G, C, A or T
  misc_feature (131)..(131): N = G, C, A or T
  misc_feature (157)..(157): N = G, C, A or T
  misc_feature (163)..(163): N = G, C, A or T
ttttangncancaaatctcnctctaacggaccctngcatggcttgttcaaaataaatgcctcaggacaataccacgttatgtaatggggagtgaactgcgtatatccgttctgctcntttatctgggcggngcctttgaagtttttgacaaactctntctggntctcacacttagggccacactcatcattactgtttgtccaaaactcgtactcaactctttcatcgggatgtggaagcgcctctctccaatcaaggtttatg

SEQ ID NO: 6 - DNA, 221 bp, Nicotiana tabacum
  misc_feature (12)..(12): N = G, C, A or T
  misc_feature (28)..(28): N = G, C, A or T
  misc_feature (77)..(77): N = G, C, A or T
  misc_feature (83)..(83): N = G, C, A or T
  misc_feature (93)..(93): N = G, C, A or T
  misc_feature (102)..(102): N = G, C, A or T
  misc_feature (109)..(110): N = G, C, A or T
cttggatggtcnaccagattgaagaacncgagaaaaagctgttttctcatccacttcataagtcacaaaatgaacancagccnttgagaatcncagctgtgntatgtannttcgaagacattggctgaggatgctgcatggaagtttgtgaaagagaaagcctatcgatatggttacgataaacccagcaatggttattggcggtttgttacaaccaatac

SEQ ID NO: 7 - DNA, 391 bp, Nicotiana tabacum
  misc_feature (187)..(187): N = G, C, A or T
  misc_feature (192)..(192): N = G, C, A or T
  misc_feature (270)..(270): N = G, C, A or T
  misc_feature (296)..(296): N = G, C, A or T
  misc_feature (307)..(307): N = G, C, A or T
  misc_feature (338)..(338): N = G, C, A or T
cccaagatgaacagtcagtcaagtcgatctcatgccatatttacaattacattggaacaaaagagaatggctaattgctcgacgaacgatgatggtgatgacatattatgtgccaagcttcatttggttgaccttgctggttcagagcgagcaaagcgaactggagctgatgagatgcgtttacganagggnattcatatcaacaggggattgcttgctcttggcaatgtaataagtgcccttggtgatgaaaagaagcggaaagaaggngcacacatcccatacagagatagcangttgacacgtntcttacaggactcacttggaggaaacagcangacagttatgattgcttgtgtcagtcctgctgacaccaatgcagaggagaccc

SEQ ID NO: 8 - DNA, 362 bp, Nicotiana tabacum
gcggttgatatgtggtctgtgggatgtatttttgccgagatggttcgaaggcaagccttatttcctggtgactctgagtttcagcaactgcttcacatattcaggctgttaggaaccccaactgagaagcagtggcctggagtcagttcactccgcgactggcatgtttatccaaaatgggaacctcagaacttggcctctgctgttccagcattgggtcctgatggcgtggacctcctcacgaaaatgctccaatatgatccggcagataggatttcagcaaaagctgcacttgatcatccatacttcgatagcttggacaagtctcagttttgaggttgcttctacttctaagatcagcc

SEQ ID NO: 9 - DNA, 404 bp, Nicotiana tabacum
  misc_feature (6)..(6): N = G, C, A or T
  misc_feature (10)..(10): N = G, C, A or T
  misc_feature (14)..(14): N = G, C, A or T
  misc_feature (16)..(17): N = G, C, A or T
  misc_feature (21)..(21): N = G, C, A or T
  misc_feature (25)..(25): N = G, C, A or T
  misc_feature (33)..(34): N = G, C, A or T
  misc_feature (36)..(37): N = G, C, A or T
  misc_feature (39)..(39): N = G, C, A or T
  misc_feature (63)..(63): N = G, C, A or T
  misc_feature (69)..(69): N = G, C, A or T
  misc_feature (78)..(78): N = G, C, A or T
  misc_feature (87)..(87): N = G, C, A or T
  misc_feature (95)..(96): N = G, C, A or T
  misc_feature (104)..(104): N = G, C, A or T
  misc_feature (114)..(114): N = G, C, A or T
  misc_feature (116)..(116): N = G, C, A or T
  misc_feature (126)..(126): N = G, C, A or T
  misc_feature (135)..(136): N = G, C, A or T
  misc_feature (147)..(147): N = G, C, A or T
  misc_feature (154)..(154): N = G, C, A or T
gcagcnagcnaagntnnggtngggnacgccaannanngntgtgcctttgatgacgtcaccagntatcantctacatanaacggaggncttgcgannggcttggntcattctacngntctaggattntcaactctnntcaattcttcnataactnacctattctcctgcagcaatatgtgagacgtaacctagaatattatttgcctttatagatattgacttattctgcttgcatattttatctgcagccggtggcatctaccatcaatacattggctggtgcattgtataaggtgttttgtgcttcacctgatcaagctaggaaggagatgcgcgatgcatgctttgactatttgagccttggtggagtattctccacaggacctgtatctttgctttctggc

SEQ ID NO: 10 - DNA, 179 bp, Nicotiana tabacum
gtcagtgcttgagctgaacccgttgcttggacttgacaactagcatcttctctttgcatgctgccctcatgtattgccaatgtaatttctcctctagcaaaccattatgtattacaaactattattatgattgtgaataacttgtgaaaagttcaatcaatctgaaagaaataatctct

SEQ ID NO: 11 - DNA, 192 bp, Nicotiana tabacum
  misc_feature (6)..(6): N = G, C, A or T
  misc_feature (50)..(50): N = G, C, A or T
  misc_feature (64)..(64): N = G, C, A or T
  misc_feature (95)..(95): N = G, C, A or T
  misc_feature (123)..(123): N = G, C, A or T
  misc_feature (141)..(141): N = G, C, A or T
  misc_feature (190)..(190): N = G, C, A or T
cgttgnttgtttcgggaaattggaacagcattggtgaaggcacttacggncaagtgtacatggntaaagaaattagaacaggggaaattgttgcnttgaagaagatacgcatggacaacgaangagaagggtttccaatanctgctatacgtgaaatcaaaatcttgaagaagctgcaccatgaaaatgnga

SEQ ID NO: 12 - DNA, 198 bp, Nicotiana tabacum
  misc_feature (11)..(11): N = G, C, A or T
  misc_feature (31)..(32): N = G, C, A or T
taaaggaccgnttttgtttcgagaaattggnncagattggtgaaggcacttacggtcaagtgtacatggctaaagaaattagaacaggggaaattgttgctttgaagaagatacgcatggacaacgaaagagaagggtttccaataactgctatacgtgaaatcaaaatcttgaagaagctgcaccatgaaaatgtga

SEQ ID NO: 13 - DNA, 168 bp, Nicotiana tabacum
  misc_feature (21)..(21): N = G, C, A or T
  misc_feature (23)..(23): N = G, C, A or T
  misc_feature (36)..(36): N = G, C, A or T
  misc_feature (72)..(72): N = G, C, A or T
  misc_feature (105)..(105): N = G, C, A or T
  misc_feature (112)..(112): N = G, C, A or T
  misc_feature (153)..(153): N = G, C, A or T
  misc_feature (159)..(159): N = G, C, A or T
ggacgtttgcatttcggattngngcacgagatgttnatgattttaggatttattttagtcatcttactcggntgatgtttattcgtttttgtgacttttactcgngggcggnggtgaccgcgtacatgctatttatttgatttttactatggntattgnttattgtta

SEQ ID NO: 14 - DNA, 152 bp, Nicotiana tabacum
  misc_feature (5)..(5): N = G, C, A or T
  misc_feature (17)..(18): N = G, C, A or T
  misc_feature (54)..(54): N = G, C, A or T
  misc_feature (73)..(73): N = G, C, A or T
  misc_feature (89)..(89): N = G, C, A or T
  misc_feature (99)..(99): N = G, C, A or T
  misc_feature (107)..(107): N = G, C, A or T
ttacntttactgagatnnttatgattttaggatttattttagccatcttactcnggtgatgtttattcgattntgtgacttttactcgngggcggtggngaccgcgnacatgctatttatttgatttttactatggttattgtttattgtta

SEQ ID NO: 15 - DNA, 227 bp, Nicotiana tabacum
  misc_feature (116)..(116): N = G, C, A or T
  misc_feature (118)..(119): N = G, C, A or T
  misc_feature (125)..(125): N = G, C, A or T
  misc_feature (140)..(140): N = G, C, A or T
  misc_feature (143)..(143): N = G, C, A or T
  misc_feature (148)..(148): N = G, C, A or T
  misc_feature (152)..(152): N = G, C, A or T
  misc_feature (155)..(155): N = G, C, A or T
  misc_feature (188)..(188): N = G, C, A or T
tatcaaatggagaagttatcaatatgaaaatagctgtcaagccacttcaactattgctaggaagcagcaaactgtgacgcgagataaacatgacacagaactcattgctaggggtngnnatgatncttgtgtagttcccnaanctgtnccantgntttaagcaatggtagccctggcgctagtggatnagctaatggctcattatgcacagtgtatgctgttcccaa

SEQ ID NO: 16 - DNA, 182 bp, Nicotiana tabacum
ttgaagagtggaagttacgagtgctcgagatgtgatgcagcagcttcttcagggtgctgcaaacagaaaggtagctgcaaccaacatgaatcgtgctagtagccgttcacacagtgtttttacatgtgtgatagagagcaaatgggaatctcaaggagtaactcaccaccggtttgctcgtc

SEQ ID NO: 17 - DNA, 338 bp, Nicotiana tabacum
gggcccgccaccaccgcaaccacctagttattcctccgtcgaacacgtgtctcacgagagtgagagtgagagcgttcatcgtcagcatgatcatcatcgttttcaaccacatgtgccttcattcttccaccatgagacctcaccacatccagagctcatcgataagccttcatttagggtttatacaaaggctgatcccaattactctctcactatccgtgacggcaaagtcgttcttgcctcttctgatccatccgatccttttcaacactggtataaagatgagaagtacagcactaaagtgaaggatgaagaggggtttccaagctttgctctgg

SEQ ID NO: 18 - DNA, 253 bp, Nicotiana tabacum
  misc_feature (3)..(3): N = G, C, A or T
  misc_feature (5)..(5): N = G, C, A or T
  misc_feature (23)..(23): N = G, C, A or T
  misc_feature (39)..(39): N = G, C, A or T
  misc_feature (53)..(53): N = G, C, A or T
  misc_feature (56)..(56): N = G, C, A or T
  misc_feature (82)..(82): N = G, C, A or T
  misc_feature (93)..(93): N = G, C, A or T
  misc_feature (102)..(102): N = G, C, A or T
  misc_feature (126)..(126): N = G, C, A or T
  misc_feature (149)..(149): N = G, C, A or T
  misc_feature (188)..(188): N = G, C, A or T
  misc_feature (198)..(198): N = G, C, A or T
  misc_feature (205)..(206): N = G, C, A or T
gtntntgtggcccacctgctgcnagagtgacacacaggnatgatcttagagcngcnattcagaagatgttagacactcctgngccatacttgntggatgtgnttgtacctcatcaggaacatgttntacctatgattcccagaggcggngctttcaaagatgtgatcacagagggtgacgggagaagntcctattgantttgagnngctacagagctagttctaggccttgcattatctaaaataaacttcta

SEQ ID NO: 19 - DNA, 553 bp, Nicotiana tabacum
gcaaggagtcaagtggatattttggatgatggttatagatggaggaaatacggacagaaggctgtcaagaacaacagattcccaagaagctactaccgatgcacgcatcaaggatgtaacgtgaagaaacaagtacaaaggctgtcaaaggatgaaggagtagtagtaactacttatgaaggcatgcattcacatcccattgagaagtccacagataactttgagcacattttgactcagatgcaaatctatgcttccttttgaaacgtccatcacttcaatgcctaaggcatgacactcaattagtcacttgtaaaatagtactacagtatattgtgtacatgcgttttgaacctagatgctatattttgaaataaaacgcaacttcattagggaatttaatttgatcattgtacaactaaaagtaatgttgctatttttttgtttttatcactttgtttttgccggagccatgctcttcattttaactcttttcttttagaattaacaaataatttcatgttggagaaagatacgtgccaaaaaaaaaaaa

SEQ ID NO: 20 - DNA, 248 bp, Nicotiana tabacum
taatggacacggatctgcaccagataatacgctcttcacaagcactgacagaagatcactgccaatactttctctatcaattattacgtggactcaagtatgtacattcagctaatgtcctccaccgggatctgaaacctagcaacttactactcaacgcaaactgtgacctcaagatttgtgattttgggctagctagaaccacttcagaggcggattttatgactgagtatgttgtcacccgctgg

SEQ ID NO: 21 - DNA, 328 bp, Nicotiana tabacum
  misc_feature (16)..(16): N = G, C, A or T
  misc_feature (30)..(30): N = G, C, A or T
  misc_feature (34)..(34): N = G, C, A or T
  misc_feature (58)..(58): N = G, C, A or T
tttgcagccacctttnacatttcggtagangatntgtccataacaagcctgacttttntaaaggaatttacagcttcaattgaagcaaaacaagtggctgctcaagaagctgaaagagcaaagtttgttgtggaaaaagctgagcaagataagcgaagtgctgttatcagagctcagggtgaggctaagagtgcccagcttattggtcaagcgattgccaataatccggcatttatcacactcaggaaaatcgaagcagcaagagagattgcccagactatctcacatgcagcaaacaaggtgtacttgagtgccgatgatctgttgc

SEQ ID NO: 22 - DNA, 2527 bp, Nicotiana tabacum
ctgaaccctaacgcacacaacttcactctttgctcctccaaatctctctccaatgcaggatttcatcggctccgttcgccgatctctggttttcaagcagtccggagacttcgataccggcgctgccggtgtcggcagcggattcggaggcttcgttgagaaactaggttcgagcattcgcaaatcgagtattggaatcttctcgaaagctcatgttcctgctcttccgtctatttctaaagctgagctgcccgcgaaggctcggaaagatgacactccgccaatccggtggaggaaaggtgaaatgattggatgtggtgcttttggtagggtttatatggggatgaatgttgattctggagagttactcgctataaaggaggtttcgattgcgatgaatggtgcttcgagagagcgagcacaagctcatgttagagagcttgaggaagaagtgaatctattgaagaatctctcccatcccaacatagtgagatatttgggaactgcaagagaggcaggatcattaaatatattgttggaatttgttcctggtggctcaatctcgtcacttttgggaaaatttggatccttccctgaatctgttataagaatgtacaccaagcaattgttattagggttggaatacttgcataagaatgggattatgcacagagatattaagggagcaaacatacttgttgacaataaaggttgcattaaacttgctgatttcggtgcatccaagaaggttgttgaattggctactatgactggtgccaagtcaatgaagggtactccatactggatggctcccgaagtcattctgcagactggccatagcttctctgctgacatatggagtgtcggatgcactattatcgaaatggctacaggaaaacctccttggagccagcagtatcaggaggttgctgctctcttccatatagggacaaccaaatcccatccccccatcccagagcatctttctgctgaatcaaaggacttcctattaaaatgtttgcagaaggaaccgcacctgaggcattctgcatcaaatttgcttcagcatccatttgttacagcagaacatcaggaagctcgcccttttcttcgctcatcctttatgggaaaccccgaaaacatggcggcgcaaaggatggatgttaggacctcaatcattcctgatatgagagcttcctgcaatggtttgaaagatgtttgtggtgttagcgctgtgaggtgctccactgtatatcccgagaattccttagggaaagagtcactctggaaactaggaaactctgatgatgacatgtgccagatggataatgatgattttatgtttggtgcatctgtgaaatgcagttcagatttgcattctcctgctaattataagagttttaatcctatgtgtgaacctgataacgattggccatgcaaatttgatgaaagtcccgagttgacgaaaagtcaagcaaacctgcattatgatcaagcaactattaagcccactaataaccccatcatgtcatacaaggaggatcttgctttcacatttccaagtgggcaatctgcagccgaggatgatgatgaattgacagagtctaaaattagggcattccttgatgaaaaggcaatggacttgaagaagctgcaaacaccactatatgaaggattctacaattccttgaatgtttccagcacaccgagtcccgttggcactgggaacaaggaaaatgttccaagtaacataaacttaccaccaaaaagcaggtcaccaaaacgtatgcttagcagaaggctctctactgccattgaaggtgcttgtgctcccagcccagtgactcattccaagcgaatatcaaatattggtggcctaaatggtgaagctattcaggaagctcagttgccgaggcataatgaatggaaagatcttcttggttctcaacgtgaagcagttaattcaagcttctctgagaggcaaagaaggtggaaagaagagcttgatgaagagttgcaaaggaaacgagagattatgcgtcaggcagtcaacttatcaccaccaaaggatccaattctaaatcgatgtagaagtaaatcaaggtttgcatctcctggaagataaatgtatgtacttgtgtccctaaactaaagtcagtttgaagaatataattaatgatcctgcaaccccagaacagagagttagatgtcttgagcaggtatacgaacgtgaggttttcttgacccgttactacaggaatatcagcgcttgtcagatagagtgagctgttactacaggaatatctgtcaacctgttaatcatattataaaatgccaataatttgcgttgtattcgttttgatcattctcctgagagcattgtaagaaaaatgcaggcctttttataacctatataagtgctctctcatggtagttgccaatattaaaacgcagagaaaagtcgagttctcatctgctgaattgtttgtaaaatgtgatatattaatgtatttaccgtcttacaacc

SEQ ID NO: 23 - DNA, 1085 bp, Nicotiana tabacum
ccacgcgtccgtgatatgggatgtcacattgatggatttattgctgtagttggacatacacatgttcttcacgaaggaccagttactggtagacctgctgacgtcattgcagctgctaatacagccgctgaagttgctttgaggcttgtgagaccaggaaagaagaactcggatgtaacagaagctattcagaaagttgctgctgcctatgactgcaagattgttgagggtgtcttgagccatcaaatgaagcaatttgttattgatggaaacaaagttgtattgagtgtgaccaatcctgaaacgagagtagatgaagcagaattcgaggagaatgaggtttactccattgatattgtgacaagcactggtgaaggaaagccaaagttgttggatgagaaacaaacaactatctacaagagagccgtggacaagagctataacctgaagatgaaagcatcaaggtttatcttcagtgaaatcagtcagaagttccctatcatgccatttaccgcaagggatttggaggagaagagggctcgtctgggcctagttgagtgtgttaaccatgagcttttgcagccatatcctgttctacatgagaaacctggtgatttggttgctcacattaaattcacagtgctgttaatgcctaatgggtcggataggattacatctcatgctctccaggagctgaagcctgcaaagtcgatagagaatgaacccgaaatcaaagcctggcttgcccttcccgttaagaccaagaagaaaggcggtgggaagaaaaagaaagggaaaaaaggtgacaagacagaagactcatctcaagctgagccaacggaaggatagagaaatggtttcaaatcttgataaatagcaattttgaggtgcttgatcgatcaacttcactgaaactattggttcactgttggtcggcactttcagctgcctttgttcttccttgtggggctttgctatacaagggacagacagttattgtcctcttgtactgtcatgttaaattactcagttttccaatgctattcaacatgctctcaatcggtctttaaaaaaaaaaaaaaaag

SEQ ID NO: 24 - DNA, 1530 bp, Nicotiana tabacum
ccacgcgtccgcaaaaccctagctcaaatcccgtttgcctccattttcattccatcaacaaaaacctaagtttatactcagcttgagacatttgataactatgtcggacgacgagagagaagagaaagagttggatctgacaagtcctgaggttgttactaagtacaaaaatgctgctgaaattgttaacaaggctctgcagttggtggtgtctgaatgcaagccaaaagcaaagatagttgatctttgtgaaaaaggagatgccttcatcaaagagcaaactgggaatatgtacaagaatgtgaagaagaaaatcgagaggggtgtggcatttcccacctgcatttcagttaacaataccgtgtgccatttttctccactgtctagtgacgagacagtattggaagaaggtgatatggtgaagattgatatggggtgtcatatagatggctttattgctgtagttggtcatacacatgtgctccaggaaggaccagttactggtagagcagctgacgttgttgcggctgctaatacagctgctgaagttgccctgaggcttgtgagaccaggaaggaagaactcggatgtaacagaagctattcagaaagttgctgcggcatatgactgcaagattgttgagggtgttttaagccatcaaatgaagcagtttgtgattgacggaaacaaagttgtgttaagtgtgtccaatcctgaaacgagagtagatgatgcagaatttgaggagaatgaggtctattcaattgacattgtaacaagcactggtgaaggaaagccaaaattgttggatgagaaacaaacaaccatctacaagagagctgtagataaaagctacaacctgaagatgaaagcgtcgaggtttattttcagtgaaatcagtcagaagtttcctgtcatgccatttacagcaagggatttggaggagaagagagctcgtttgggactcgttgaatgtgttaaccatgagcttttgcagccctatcctgttctacatgagaaacctggtgatttggttgctcacataaaattcacagtgctgttgatgcctaacgggtcagataggatcacaactcatactctccaggagctgaaacctgctaagacaatagaggatgaacctgaaatcaagacctggttagcccttcccgtaaaaagcaagaaaaaaggcggcgggaagaaaaagaaagcgaagaaaggtgagaagacagaagactcatcccaagctgaaccaatggaaggagaatcaaatggtgctgaatcttgatatgttgctagaactttgatttgattcaattccaagaactatttgttgattgttagttaaatgtgggatattgaggtagttgtggatctttctttgcggcattttgcaatacaagaatggcatggacagttgttgtccttgtcttgacacatttgtcatgctggaattattaagtggggtttccaatgctataatgtcatgtgtatcaaaaaaaaaaaaaaaagggcggcaactctagagtatca

SEQ ID NO: 25 - DNA, 2231 bp, Nicotiana tabacum
ccacgcgtccgcttggggattagcaggttgtcgacaaagaaaattcatttgtttcctacgatcacacaagtcgtggttgttgcagatccgctttcgctaaggggaaactcaaaagcccagttcgtgtagttcatccaaagatgagttccagcaaaagggttgggaagtcttctaattcatcaggaaagcagaaagctatatgcgaaacaactactacaccaacggttgatgatataaatgtaggcgtagaagatatggggttgaactccgatcaaaatgatggatggatagtgtgttctagaaagtccaagaacaagggtggaagcagcagtgctggaatgaagcaatggatttctcagaatcccactccaaaagccaaactgggaatgcgtaacaatattgttggatcatcaggacaggggtctaggaataactggtccacacctaattatcatcctcgaaaacctgctggcagagaatgctacacaccgacacccgctgcagttcctcctgccctgaagaatggttgggattggtcatctgtcgctcgttccaatgaggaccatgatacttattcccctgtcgctgatgtcaaggcttcctgtgaacatgatggagaggataatgaatcggatttgcctgatgatgacagtgatgatgagcttccgagtgatgacgactttgatgatcactcggatgtaaatgaaatgagtcatgaggtactcaaggaaagtcgttggttcaagaaccttttcaaatgtcttgacagtttgactgtcactgagattaatgatccggaaagacagtggcactgccctgcatgcaaaggtggtccgggtgcaattgagtggtttccagggatacagtcagtgatgaaccacgcaaaaacgaaaggatttaggatgaaattacacagacaacttgctcaacttttggaggaagagctgcgtcggaggggaacttctgttgtacctccaggtcaagtgtatggaagatggggtggcggtgaatatgaagataaggaaatagtgtggccaccgaccgcgattatcgtgaacacagtgcttgagaaagatgaaaatgacaagtggattggaatgggaaatcaggagctgcgtgattatttcagctcttatgctgctgtcaaggcagcgcgaagctcatatggtccacaaggccatcgtggtatcagtgtgttgatttttgaggccactcccgtgggatacatggaggctgtacttctcagtgagcagttttctgaaaaaggaagtgatagagatgcatgggaacacaatccagttctcttttatcctgggggaaaacgtaagctttatggttacatggcagagaaaagagacatggacaactttaaccggcattcacatgggaaatcaaggctgaagttcgagatgaggtcatataaagaaactgtttcgaatccagcgatgcagatgtcggaggataatcaacagctcatatggttcaagaaccaagcctctaagcaccaaaagcgggctaaagctactgaagagtctctaagactggtgagtgaaaagcaccgtcagacagtcgaagagaacaagattgtcagactgagaactaagatgcaccatgaacggaacaaggaagagatggaatatctagagcagttttttaatgatcagttgaaaatgatttatgatgccaggactgctgaggaggacaagtttgaaaagatacagcaggaacagcgtgagatgatctatcaatctaatgcaactatttcctcggctgaggatcatcgactcagggcagagaaagttgcgaaatttatcaaacttcaggacaaggatatggaagaatttgtggaagagagggataatctgataagagctcatgaagatagggtaggttcaatgagacgcaaatacttgctgcaatactcggaagaggcagttgcacttgagaagaattttgatctcgaactggctaagctgatggagaagtactcatcaaagcaatctgagcaggtcaacagcagtgatgccgtgtgaccctatagtaatactattcaagcgccgttttagctttaaatttctgtgaacttgggattcttcactgacttttataatcctggtctgtccatgtgttttgatgatgctaaagaaatgattctaatagttatattatatcctaaaacatatggcttgaactatttgttctagaaaaaaaaaaaaaaaaaaagggcggcc

SEQ ID NO: 26 - DNA, 2032 bp, Nicotiana tabacum
ccacgcgtccggccatggtagcaaaacagttagctgatgacgaaccacaaaaaaccctcaaggattcaccaaagtttgaatccaaatcccataagaaaaaacataagagaaagctcgaagaccctgaacctgaagaagttactgttatagagtccaagaaagagaaaaagaagaagaaaaagcagaaacagaaccaagaacaagaagggtctattgtaaacagtgaaaatcttagtgggtctaatggcaaggttgaaactattaatgggtcagctgagttctctgaaaaaagtagtacaaatgtggtggtaactggtaaggatgctaatgagtcaaagtacaaagctttagcaaaatttgtggattcagggcttccaagtgatgtgttagattgttgcaagaattttgagaaaccatcaccaattcaatcacattcatggccttttcttttagatggccgtgatttcattggaattgccaaaactgggtcaggtaagactttggcttttggtattccggctattatgcatgtcctgagcaagagaaagagtaaaaagtctaagaatccgctttgcctcgtgctttcgcctacaagggagctagctcaacaaatatcagatgttctctgcgatgctgggaagcctactggtgtgcagtcagtttgtctatatggtggagtcgataagcatcatcaaaaagcttctcttaaatctggtgtggatattgttattggaacccctggtcgtttgcaggatatgatggaaatgggagcatgcaacttaaaagcggtttcttttgtggtgctagatgaagctgatcggatgctcgatttaggttttgaacctgctgtccgtgccattttgagccaaacatgctctgttcgacaatcggttatgttcagtgctacatggcctccggctgttcatcaattagctcaagaattcatggatcctcatccaatcaaggtagttgtaggttcagaagatttggctgccaaccatgatgtcatgcaaattgtcgaggtcttggaagatcgagcccgtgatgagcgtttacagtgcttgctggaaaaataccacaagtttagaaagaacagagtattggtttttgttttgtacaagaaggaagcatctcgggttgaaattatgctacagaaaaggggttggaaagttgtgtccattagcggtgacaagcaacaacatgctcgtactaaggcgttgtcactctttaaggatggaagctgtcctttaatgatagctactgatgtagctgctcgaggtctggatatcccagatgttgaagttgtgataaattatagttttcctttgacaacagaggattatgttcatagaattggaagaactgggcgagctggtaaaaaaggtgtagctcatacattcttcactaaggacaacaagggactttctggggagttgataaatgttctcagagaggctggacaggttgtgccagctgcccttcttaattttggaacccatgtaaagaaaaaggaatcgaagctctatggtgctcattttagagaaatagatgcaaatgctccaaaggctacaaaaataaaatttgacaattctgatgaggaagattgagaagcaatatcattattaccaaagcaacacaactccattgaattggctcatcatcctgacattccgtgcaatcatttggcggatacatgtagaagtggattactgcgggaagaatgcaagagatatctcactgctcatgtatatggtaattgaagcttaaatctattggcgcttcaacctgtcatagataatgagtttgaaatactattgtgtttttgtaccttaatattcttttcacccatacagttggcttagtaaggtttttctaggatccaaatgtagtaatacacttattataatttgcccttttaagtgatgtatgtatgattgcaccttccaaattactgcacttggcaaaaggtggaaaaatattcgaaaatgagattcaaaactggttcatgcaaaaaaaaaaaaaaagggcggcc

SEQ ID NO: 27 - DNA, 1462 bp, Nicotiana tabacum
ccacgcgtccggtggaacgccacgttgccattctctcttcggtgacaagcttcaaacgccaggcgtctctctcgtatctgagtgctggtgttttttcttctcaggttcaagttccggcagttaatgcggcaaattcaaatttagatgttatgcaatagctgcgtaagatttgtgttttttcaagcagcacatattgatacacacattgtgcaaaggcaatttatcaaactcattaaaagtttgaatgcaactcgtagcataagttattcttggaatagtgtatatacagcaaggagaacgatgatggtggatactggagcaactgctaaaggaggacctgtcgttgatgtttcaccggagaaggatgataataatggtggtttcgctagcggaggatggaagagtgaagatggaagactgagttgtggttattcaagctttagagggaaaagagccaccatggaggatttttatgacattaaaacttggcaaagttgatggacaaacaggtagcttatttgggatatttgatggccatggtgactctcgcacagctgagtttctgaagaaacatctctttgagaatctaatgaaacatccagagttcccaacgaacgccaagctggccataagtgaaacatatcaacaaacagacatggacttcttagattctgaaaaagataccttccgagatgatggttccactgcttcaacagcagttctagttggtaaccatctctatgttgccaatgttggagattcacggactataatatcgaagggcggaaaagcaattgctctttctgaggatcataagcccaatcgaactgatgagaggaagagaattgaaagtgccggaggtgttgtgatgtgggctggtacctggagagttggtggtgtattagcaatgcacgtgcttttggcaaccgtatgttgaagcaatttgttgtggctgaacctgagattcaggatcaagagattgatgaggaattagaactactcgtgcttgccagcgatgggctctgggatgttgtaccaaatgaggatgctatttcacttgcacaagcagaagaagaaccagaagcagctgctaggaagctaacagaaactgcatttactcggggtagtgctgacaatattacctgcatagtggtgaagtttcaccacaagaaggttgaaccagaggggagccagcaaggttgaagaatttgttgatgctgcatctgccttttcctggtggaaggctgcttcaatgatgccggtgcaagttgctgacgatagcatcacaggggctgtcattttttcattcatttctttgcattgtttttccccgtcatcctgtttaactgttgtatttaaggtgtctgcgtttgtgcgtctgctttctccttttctgtagaggtattgtctggataaactttactgtgaaacgtagttaaaaggttaaaaaaaaaaaaaaaag

SEQ ID NO: 28 - DNA, 925 bp, Nicotiana tabacum
ccacgcgtccggaagaaatggttgaattcatggaaaaggtcttcaactccctcggctcagaagaactcaccgtggaggaacgaaacctcctctccgtcgcgtacaagaacgtgatcggagcgcgtagggcatcgtggcgtattatctcatcgattgagcaaaaggaagagtccagagggaacgaggaacacgtaaactctatccgcgagtacagatctaagattgagaatgaactctctaagatctgtgatggcattctgaaattgctcgatgcaaagcttatcccttctgcagcatctggtgattctaaggtgttttacctgaaaatgaaaggagattaccaccgctatttggctgagttcaagaccggtgctgaacgtaaggaggctgctgagagtactctcactgcctacaaagctgctcaggatattgcaactactgagcttgccccaacacatcccatccgacttggactggctcttaacttctctgtgttttactatgagatcttgaactctcctgaccgcgcttgcaatcttgctaaacaggcctttgatgaagcaattgctgagttggacacactgggcgaggagtcttacaaggatagcactttgatcatgcaacttcttcgtgacaatctcactctctggacatctgatatgcaggatgatggggctgatgaaatcaaggaagatcccaaacctgatgaagccaaaaattgaaggaattgaaactctctaatttgcttttcacttcttcctggttgtttttattggaagaagctgattatcgtaatttcctttactattatggttttccgctagggggttgtcttattggaaatgaacaacttttaatattgatgtttcagaagttccatctttaatttaatgtggtttttctggtggtaaaaaaaaaaaaaaag

SEQ ID NO: 29 - DNA, 2875 bp, Nicotiana tabacum
ccacgcgtccgctactgtttcttcatcgctatgccgtcagttccgcttcctacttgactgaatctgccgccatggaaggggatatctacacatctaactgcagaattgttacataaacactgatgggaatgcagaagagatattctcaaatattcaaggtagcattttgaaaaatgtcagatgatatggtcattcattttgcatccaattcttcaaaccaatcagaccagtctctgcccacaaagattgctaaacttgaggcaagaatggtgggcaaagcctcatctacatctacatcccgagctacttcctggtctgccccagccaagtttgggcttgggcctgggcctgctgacaatgttgctgagcttgctgtctctagtgattctgatgatgatgatgataatggaagggaatttctcatacaagcaaacactcagaagcggcgcaaactcgaggatgacaacagctcaacttcatttgaacatgtggagacagcagctgatactgtgaaaaagatagtagacaatacagacacaagcaaagtgggttcagatgtgaatagacggaaacaaagccgtgtcaagggacaaactaattctggtagaggacgtggttcccgagttagtgatcagaccaagtcacaagcagtttctgtgtcaaatggtcagctcgagaactcttaccagaaggatggtttgccaaaagagcaaattgggcacgatcgacagactgtattcgaagaggagatcacttctttacgggcaaaagttgtggctttggaggaagagcttaagaaatcccgtcaagaggcatcagattatcaacatcagtgtcaacagctggaaaaggaattgaaggatcttaaagattatgagcagcagacaaagccaaagagaacgaaaataatatctgaattgttaatatctgtttcaaaagctgagaggcaagaggcacgaatgaaagtgcgacaggaatctttgagactgggcaacgtgggagtaatcagagctggaaccattatttctgaggcctgggaagatgggcaagcactaaaggacctcaatgctcagcttagaaacttattagaaactaaagaagctattgaacggcagcgtaaattgctcaagaaacgacaaccagataaaagtgatggaggagatgtggagggaggtttgcaggaagaagattctctcattcaggatgagatctacaaatctcgtttagccagcatcaaacgtgaggaagatgtgataatgcgtgagagggaccgatatgaactagagaaaggaaggctaattcgtgaaatgaaacgcatacgtgatgaagatggttctcattttaacaattttcagattttgaaccaccgatatgccctcttaaaccttcttggaaaaggaggatttagtgaggtgtacaaggctttcgacttggtagaccatagatatgttgcatgtaagctacatggactaaacgctcagtggagtgaagagaagaagcaaagttatatacggcatgcaatcagggagtacaacatccacaagactttggtgcaccatcacattgtgcggctttgggacatttttgagatagaccaaaacaccttttgcactatcttggagtactgtagtggaaaggaccttgatgcagttctcaaagcaacacctgtgttgccagaaagagaagcaagaatcatcattgtgcagatttttcaaggccttgtctacttgaataagaagtcacagaagatcatccattatgatttgaagccaggcaatgttttatttgatgagtttggcattgctaaggtcactgattttggccttagcaagatagtggaggatgatgttggatcccaggggatggagctaacatcccagggagctggaacgtactggtatctacctcctgaatgctttgagctaagcaagacacctcttatatcctcaaaggttgatgtctggtcagctggtattttgttgtaccaaatgctgtttggcaaacgtccctttgggcatgaccagtcacaagaaagaatactaagggaggacacaattattaaagcaagaaaggttgaattccctacacgaccagctgtctctaatgaggcaaaggagttcattcgtcgttgtttaacatataatcaagcagataggccagatgttttaagtattgctcaagacccttacttgacatactcaaagaaatgataggaggatgttaatcccaactacttggacagagggtattgggacgaggattggtgctcaaaggaattttgtatagttgtaaagccatgtaattttttgtccctgtaccttcgactagagtggggcggctcaaggggagctttgctttaggccccaaaattttgggggcatttgcatctatacccagtttttgggttaacttttaacttatatccgcattgcaaaaaaaattgcaagcatacctacttttcgggtaacttcagacattcgggtctgaagtagcaaaaatttatgtctgaagtttgaacttcagaatgttttgcctgaagtgtagtaaaacttcagatatttttgcctgaagtttggcctgacttgcaaagtcaatcacgcaaacttcagttcatagtgcaatggcaaacttcagctcaataaaattacagcatgttttggctgaagtttttgttttgtaattgttgaacttcagcattttaggaactgaagtttgttttgtaattgctgaactttagcattctaggggtgaagtttgttttgtatttgctgaacttcagcattctaggagttgaaatttttgtttatatttgctgaacttcagcattcttagagctgaagttctaagtctgcacacggaaatgaggaagataacc

SEQ ID NO: 30 - DNA, 2371 bp, Nicotiana tabacum
ccacgcgtccgacgaaatccaaccgtcgaatctcaggcaacaggcggcagctcatttcaccgctgtaacaaaaattcgagagaatggcaatggtagatgagccattgtaccccatagccgtgttaatagatgaacttaagaacgatgatatacaattacggttgaattcaattaggaggttatcgactattgcacgtgcccttggtgaggaaagaactcgaaaggaattgatcccttttttgagtgaaaacaatgatgatgatgatgaggtgttattggcaatggctgaagagcttggtgtgtttatcccttatgttggaggtgtagagcatgctcatgttttgctcccgccgttggagacgctttgtactgttgaggagacctgtgtgagggataaagctgttgaatcgttgtgtaggattggatctcagatgagggagagtgatttggttgattggttcgtccctcttgtgaagaggctggcagctggtgaatggttcacagctagagtttctgcctgtggactctttcatattgcttactcaagtgccccagagatgttgaaggcagaacttcggtctatttacagtcaattgtgtcaagacgacatgcctatggtgcgaagatcagctgccacaaacttggggaagtttgctgctactgttgaatctacttacctcaagagtgacatcatgtcaatatttgatgatcttacacaggatgatcaggattctgtacgcttattagctgttgagggctgtgctgcacttggcaagctgttggagccccaggattgtgttgcacacatcctgcctgtcattgtcaacttctctcaggacaagtcttggcgcgtccgctacatggttgctaaccagttgtacgaactatgtgaagctgtagggcctgagcccactaggacggatttggtgcctgcctatgtccgtttgcttcgagataatgaagctgaagttcgcatagctgctgcagggaaagtcaccaaattctgtcggattcttagtcccgagcttgctattcagcatattcttccctgtgtgaaggaattatcatcagactcttcacagcatgtcagatctgctttggcttctgttataatggggatggctcctgttttgggaaaggatgcaaccattgagcatcttcttccaatatttctttcccttctgaaggacgagtttcctgatgtgcgcctgaacatcattagcaagcttgatcaagtcaatcaggtgattggaattgatttattatcccaatctttgttgccagctattgttgagctagcagaggacaggcattggcgagtccgtcttgcaataatagaatacatacctctattggcaagtcaattgggcataggattttttgatgataagcttggtgccctttgtatgcaatggttacaggacaaggtttattcaatcagagatgctgctgctaataacctaaagcgtcttgcagaagaatttggtccagagtgggcaatgcagcatataattcctcaggtcttggatatgactaccagtccacattatttgtatagaatgacaattcttagagcaatttcattgcttgcacctgtaatgggctctgaaataacttgttctaaattgctgcctgtggttattactgcaacaaaggatagagtgcccaacattaaatttaatgtggcaaaggtgttgcaatcccttatacctattgttgaccactcggtggtggagaaaaccattcgccctagtttagtagagctagctgaagaccctgatgttgatgttcgcttttatgccaatcaagcacttcagtcaattgataacgtcatgatgtcaggctagagaatataactgtggtgagagtactacaaatctctcttcaaatccctctttggtaggattttgctctcacacgaagacgcaaaagagaaaatgtgcaagcaaaatgcattctgttgagcttggagtcgtatattgttactaattcttttgtaggatttgacattcaagatgctgtgacactaatgaacaccgagtgttttttcatgtaaagttactgccgtactatttagatctgctaagctcatgtatttgcttttgttagtgtacttttttggtgtttgaacttacaactttttacctgcgttattctagcagatttgttgcgtttacattagcgtttgcgtttcttcctagccgatgttatgtttgagcagtgcccccgccaccctctctttttctcaggtcttatgctttctatgtgttttttcatgccgatagaatgtatgtggaacttttagtacttattattttttatgttgtatttgttggcttgagatgagcaacataaataataagaaactggg

SEQ ID NO: 31 - DNA, 1171 bp, Nicotiana tabacum
ctgtacaaaaaagcggctggtaccggtccggaattcccgggatatcgtcgacccacgcgtccgaggagattgagctgagctgactcaatgtttccgagattgattcaaccacaaggggaagatgaatataatatgaatgttgggattcatcatactcataatattaatggagatccttgccttgtgctgacgtcagatccgaagcctcgacttcgttggactgctgaccttcacgaacgcttcgttgatgctgttactcagcttggcggtcccagcaaagctacgccaaaggcgataatgcggacaatgggtgtcaagggactgaccctcttccacctaaagagtcaccttcagaaatacagactaggacttacagctacatattcattagagagcccttgttctggtggtactcctcagcagttgccggcatcggacttgaatgaaggttatgaagtcaaggaggcattgagagctcagatggaagtgcaaagtaaattgcacctgcaagttgaagctgagaagcacttgcaaattcggcaggatgctgaacaaaggtatattagcatgctggagaaggcctgtaaaatgcttgctgatcaattcattggtggtgtagttactgaaaatgatcaagagacttgccaaggattaggaacaaggacacaagttagccctctttgtaatccacttggattatgcccctcggaatctgctgatcttgttggaatccatggtccagaagaagtttcccccagaatccatccacaattcaccgattgttccactgaaagctgcttaacttcgcatgagagtcctgctggacttcccctagaaggaacttcacctggaggaagaaaacgagggccgaatggagattcaacacatgcatcagttgttggggtgaagcagatatgatatcgtcaggtgttcgtctgcttcaagttaatcgctttgggattactagctctaatgttcaaaatgtctcttcttaagagattagtgctgagtttatctacagccattgattctcaaactgcatattgcggtttctgggaatactgatgggccttggacttgtcaagttgtaaatgcaagctgatgactttctaactctaactgcgccccctgaacattaaatcctaaaaaaggaagaaaattgagatgcgag

SEQ ID NO: 32 - DNA, 1101 bp, Nicotiana tabacum
agcggctggtaccggtccggaattcccgggatatcgtcgacccacgcgtccgaaagaagagaaaaagatgggtgctgacaaagggaagaagcaaaaagtggaggaagagaacaacaccattgatggtgagctcgttttttccattgaaaaattgcaagaaatacaagacgagctcgagaagatcaatgaggaagcaagtgataaagtattggaagtggaacagaagtacaatgagatccgcaagcctgtctatgacaaacgaaacgacatcattaaagctatcccggacttctggttgactgcttttttgagtcatcctgtcctaggtgaacttctaactgaagaagaccaaaagatcttcaagtttctaagttctattgaagttgaagactctaaagatgtgaagtcgggctactcgataacctttaacttcaatgcgaatccttattttgaaaatacaaagctcacaaagacctataccttccttgaagatggacccacaaagatttctgctacaacaataaaatggaaagaaggcatgggcattcctaatggatttgcacatgagaagaaaggaaacaagcgatctcatgctgaggaaagcttcttcacatggttcagtgaagtcaatcaaaaagatgaggatgaggatgaggccctagagattcaggatgaggtcgctgacataattaaggatgacttgtggccgaaccctctcacctattttaacaacgagcctgatgaagaagattttgatggtgacgagggaaaggacagtgaaggctctgaagacgaagaggaagaagaagaggaggatgaggatggtgatgaagaatgaaggcagtaaactgttcaagacccctattttgggatctcgtcttcagcggttttaatcatcagggtttaatgtctgtaaagaggctttgaatgttgccaaagaacagaataactgtggtgactataccttttcttctcttgtatggttataacttataagcaaaatatctaattccggaggttccaaaatgttttcattaggctagttcgattaatgaagtgtttgtctggcaaaaactgataatgttaggttattgagttatg

SEQ ID NO: 33 - DNA, 2130 bp, Nicotiana tabacum
ccacgcgtccgcccacgcgtccgggcagctcatttttaccgccgtaacaaaaactcgagagaatggcaatggtagatgagccattgtacccaatagccgtgttaatagacgaacttaagaacgacgatatacaattgaggttgaattcaattaggaggttatcgactattgcacgtgcactcggtgaggaaagaactcgaaaggaattgatcccctttttgagtgaaaacaatgatgatgatgatgaggtgttattggcaatggctgaagagcttggtgtgtttattccttatgttggaggtgtagagcatgctcatgtcttgctcccgcctttggagacgctttgtactgttgaggagacttgtgtgagggataaggcggtggaatcgttttgtagaattggatctcagatgagggagagtgatttggttgattggtttgtccctctcgtgaagaggcttgcagccggtgaatggttcactgctagggtttcagcttgtggactctttcatattgcttactcaagtgccccagagatgttgaaggcagaacttcggtcgatttacagtcaattgtgtcaagacgacatgcctatggtgcgaaggtcggctgcgacaaacttggggaagtttgctgctaccgttgaatctgcttacctcaagagtgatatcatgtcaatatttgatgatcttacacaggatgatcacgattctgtacgcttattagctgttgagggctgtgctgcacttggcaagctgctggaaccacaggactgtgtggcacatatcctgcctgtcattgtcaacttctctcaggacaagtcttggcgcgtgcgatacatggttgctaaccagttgtatgaactatgtgaagctgtagggcctgagcccactaggacggatttggtgcctgcctatgtccgtttgcttcgagataatgaagctgaagttcgcatagctgctgcaggaaaagtcaccaaattctgtcggattcttagtcccgagctagctattcagcatattcttccctgtgtgaaggaattatcatcagactcttcacagcatgtcagatctgctttggcttctgttataatggggatggctcctgttttgggaaaggatgcaaccattgaacatcttcttccaatatttctttcccttctgaaggacgagtttcctgatgtgcgcttgaacatcattagcaagcttgatcaagtcaatcaggtgattgggattgatttattatcccaatctctattaccagctattgttgagctggcagaggacaggcattggcgagtccgtcttgcaataatagaatacatacccctgttggcaagtcaattgggcataggattttttgatgataagcttggtgctctttgtatgcaatggttacaggacaaggtttattcaatcagagatgctgctgctaataacttaaagcgtcttgcagaggaatttggtccagagtgggcaatgcagcatataattcctcaggtcttagatatgactaccagtcctcattatttatatcgaatgactattcttagagcaatttcattgcttgcacctgtgatgggctctgagataacttgttccaagttgctgcctgtggttattcatgctacaaaggatagagtgcccaacattaaatttaatgtggcaaaggtgttgcaatcccttatacctattgttgaccactcggtggtggagaaaaccattcgccctagtttagtagagctagctgaagaccctgatgttgatgttcgcttttatgccaatcaagcacttcagtcaattgataacgtcatgatgtcaggctagagaatataactttggtgagagtactagaaatctctcctcaaatcctctttgatagtcttgggattttgctctcacacgaagacacaagggaaaatgtgcaagcaaaatgcattctgttgagcttggagtcgtatattgttactaattcttttgtaggatttgacattcaagatgctgtgacactaatgaagaccgagtgtttttaaatgtaaagttgcttctgcactatttagatctgctaagctcatgtatttgtttttgttagtgtacttttttggtgtttgaacttcccacgttttctgcg

SEQ ID NO: 34 - DNA, 1061 bp, Nicotiana tabacum
tttgtacaaaaaagcaggctggtaccggtccggaattcccgggatatcgtcgacccacgcgtccgagaaattagcagttagagacactgagaagcagcagctctcttcctcagctgctgtgtgcttaggcaaagaataaaatgggggcagacaaagggaagaagcagaaagtggatgaggaaaacaacaatgttattgatgaaaagctcattttttccattgaaaaattgcaagagatacaagacgagctcgagaagatcaatgaaaaagcaagcgacgaagtgttggaagtagaacagaagtacaacgagatccgcaagcctgtctacgataagcgaaatgatgtcattagctctatttctgacttctggttgactgcttttttgagtcatcctgttcttggtaaccttctcactgaagaggaccaaaagattttcaaatttgtaagttctattgaagtggaagactcaaaggatgtgaaatcgggtcattcaatcacgtttaactttaagcccaatccttattttgaaaattcaaagctctcaaagacgtataccttccttgaagatggacctacaaaaattacagctacaacaataaaatggaaagaaggcatgggcattcctaatggagttgctgacaagaagaaaggaaacaagcggtcccacgctgaagaaagtttctttacatggttcagtgaagtcaatcaaaaaggtgatgtggatgatgacgaaaatgagattctggacattcaggatgatgaggttgctgaaataatcaaggatgacttgtggcctaaccctctcaattattttgaccatgagcctgatgaagaagatattgagggcgatgagggaaaggacagcggaggctctgaagaggaagaagaagaggaagatgatgaagatgaagaagacgaatgaactgttggtagaccttgtgtttgatttgagttctcatcagtgtttcaatcatcagagttggtctctgtaaagaggtttcggatattgcagaaaaattgaatgacatatagtggtgactctaatttttagtttcagtga

SEQ ID NO: 35 - DNA, 2876 bp, Nicotiana tabacum
ccacgcgtccgatcttgaaaaagttccattcttttttctccttctgcttcttcttctgattgaagattctgaacctgttctaagtttatggataggtggaatacttcactgagtggatattacaactacccttttcgattcttgcatttttattccatttttgttgtgattgtgttttcttccattttccctattatatcagctgggaggaggtcagatggggttattgtaactcaagctgattttcaagcacttaaggccattaaacatgaactgattgattttagaggaatcttgacaagttggaatgatagtggtttaggagcttgtgctggtggatggataggtataaagtgtgttaatggggaagttatagctatacagttgccttggaagggattaggtggcacaatctctgaaaaaattggtcaattacaagctcttagaaagcttagtattcatgacaatgttattgctggtcttgttccaacttcgttgagtttccttccaaatcttagaggtgtttatcttttcaataaccggctttcgggttcaatcccaccaaccattggcagatctccacttcttcagactcttgatcttagcaacaatcagctcactggtactatccctcctagtcttgcaaattccacaaggttatacagactcaacttgagctacaatgcactttcaggttcaatcccagtaagttttactcaatccccttctcttacttttcttgcacttgaacataacaatctttctggctctattcctgatacttggggtaatgttgttgtgaacgataagtcttatcaacttcagtatcttacccttgatcacaatcttttatatgggaaaattccagcttcaattagcaagttaagtatgcttgaggagattaatcttagtcataaccaaattaatgggactattcctgatgaattaagtgcacttacaaggcttgctcttcttgatttatctaataattccataaatggaactattcctgttagtttctccaatctttcagctcttgttactttgaatttaaagagcaatcttttggataaccaaatcccagatgtcatatatagattgcaaaatctttcagtgttggatttgagtaagaataagctcactggccatattcctgccaccattgggaatatttctaggctcaactcacttgatttatctgaaaacaatttcactggtgaaatcccaaactctcttgtttctttggcaaatttgacttctttggatgtctcttataacaatctttctggggttgtcccatctcttctttctaagaagttcaattcaagtgcttttgttggaaatctagagctatgtggatatagtccctcaactctatgtgcttcaccacctcctcaaactcttcctccttctcctattggtggggttgccaagcctcgccatcgcaaacttagtactaaggatatcattctcatagcatctggagcacttctagttgttctacttcttttgtgttgcatgctactttgctgcttgattaggaaaaaggcaaattcgaaagcaaaaaatggtagtaaagccagtggcttagctaccacagggagaggtgcaaagccggttccagcagcagcagcaggtgctgaagttgaatcaacaggtggaaagctagtccatttcgatggaccattcgtgttcacagcggacgacttgttatgtgccactgcagagataatgggaaagaacacttatggaacagcatataaggctacattagaggatggtaatcaagttgctgtgaagaggctgcgcgagaagatcacaaaagggcaaaaagagtttgaagctgaagttgctgaattaggcaagattcgacacccaaatattttggctcttagagcctattacttgggacctaaaggagagaagcttcttgtctatgactacatgcctaatggaagtctctcatccttcctccatgctcgaggtcctgagacaacaatagactggcctacaaggatgaggattgctattggcataacaaaaggcatctgctttttgcataccaaagaaaacataatacatgggaatcttacatcaagcaacatactacttgatgagctaaacaacccaaagattgcagatgtaggcctttctaggcttatgacaagtgctggaaacaccaatgtgattgccactgcaggcacactaggttatcgtgcaccagagctttcaaagatcaagaatgcaagtactaagaccgatgtctatagtgttggagttatcattttggagctcttaactggaaagtcacctagcgaggcaacagatggactcgatttgccacagtgggttgcttccattgtaaaagaggagtggactaatgaagtgtttgatgtggaacttatgagggatgcccctaatattggtgatgaattgcttaatactttgaaactagctttgcattgtgttgatccaacaccaactgctcggcctgaagctgagcaagtacttcagaaattggaggagattaaaccagagctgatgttagcaccccccagttctggaaatgatggcgctgcagttcaagaaaaaaatgaataaactcagtaaggtttgattgctaaaagtgtattgaaaaaggtttaggagttccagcttttttacttgattgacacccacctatttattctttcatttttttttttgatccagtggagtgagttgttgtctcctattagttctattagtaaactgtatatccgagcttctgattgctgcatagatgcaaaacgcattttgttcaattccctctattctttgcaatgtaatgcaataatagtatctatctttttgatgacatcaacacacgccacgtg

SEQ ID NO: 36 - DNA, 2018 bp, Nicotiana tabacum
ccacgcgtccgccgtgatgtaatcttggtgatgctacttattcccttttcccttcttgagcccaaactcaagaaggtcaaaaacaaaaaaattacaaaaagctggaatcttgcagtttttttatttaatttatttatcctatgttgaattaatttttggggtcaatatttcccaatttgtagtctccaatggagcctcgtgttggtaataagttccggcttggccggaaaatcggtagcggttcttttggagagatctatctcggcgctaatgttcaaactaacgaagaggttgcaattaagctggaaaatgtgaaaacaaagcatcctcaactattatacgaagcaaagttgtataaaatactacaaggaggaactggaatccccaatttaaaatggtttggagttgaaggagattataatgcccttgtgatggatttgctggggcctagtcttgaagatctcttcaacttctgcagtaggaagctgtctttaaagaccgttctcatgctcgcagatcagatgattaatcgggttgaatttgttcatgccaaatcttttcttcatcgagatataaaacctgacaactttcttatgggattaggaagacgtgcaaatcaggtctatatgattgattttgggctggccaagaagtatagagactcatcaactcatcagcatattccgtatagagaaaacaaaaatttgacaggaactgctagatacgcaagcatgaatactcatcttggcattgaacaaagtcgaagggatgatttggaatcgctgggttatgttttaatgtacttcttaagaggaagtctcccttggcaggggctgaaagcaggcactaagaaacagaagtatgagaagatcagtgagaagaaagtatcaacatcaatagagaccttgtgtaggggatatcctgcagagtttgcatcatattttcattactgtcgatcactaagatttgatgataaaccagattatgcttatctgaagagaattttccgtgatcttttcattcgtgaagggtttcaatttgattatatatttgactggaccattttgaaatatcagcaatcacagcttgccaatcctccatctcgtgctcttggtggtactgctgggccaagctcagggatgcctcatgctcttgttaatgttgagaggcaatcaggtggagatgaaggtcgaccaactggttggtcttcatcaaatcttacacgtaataagagcacggggctgcatttcaattctggaagcttattgaagcaaaaaggcacagttgctaatgatttatccatgggtaaagagttatccagttctaattttttccggtcaagtggaccattgaggcgtccagttgtctctagcatccgagacccagtgattgcagggggtgaacctgacccctccggcactctgacaaaagatgcaagcccgggaccattgcgtaaagtatccagtgctgcacggaggagttcaccagttgtgtcctcagatcacaagcgcagctcctctatcaaaaatgccaacataaagaatttagagtccaccgtcaagggaatagagggtttaagttttcgatgatgagggactgcattagtagctgtgctttgtctcagttctccgttcactgtaaattttggcacaccaacttggggagtaagagttctgatattagttgctgtcaggaagtaccataaagctgaattatacaattaaaatttgggatccaatcgcaaaagcacattaaggatatgatggggttgcagatccaaactcacagattccagtttatgctcgtccatacagttataggcactttccatattcttttctttaatctctgtctcttgcttgttattgttatgtcgtggtattcttgttgaggtcatgtttgtgaattgcgaagatggtcatgtataattgccgagaaatcatgtactagtttgttttaaacatgagcaaactgttattttgttcaagctactttaatatcaaaaaaaaaaaaaaaag

SEQ ID NO: 37 - DNA, 670 bp, Nicotiana tabacum
ccacgcgtccgcccacgcgtccggaagaagaagcctgctgccatggcttccgagaaagaagctgctcttctcaccgttccttcagattctcctaccttatttgacaagatcattaacaaggaaatcccagcaaacattgtctacgaggatgacaaggttttagctttcagagacataaatccccaagctccggtgcacattctgcttattcccaaggtcagggatggcttgactggactgtccaaggctgaagaaaagcattgtgaaattcttggtcaacttctttacaccgcaaagcttgttgctaaacaagaaggtctgctcgagaatgggttcagacttgtgatcaatgatgggcctagtggatgccaatctgtttatcatcttcaccttcaccttctcgggggacgacagatgaactggccacccggctaaaggaagccgagatgaattccagatctcatggagtatccagacttcatccgatcatctatgtgtagcacttactgaaaacactatcgtctatgtgtagcgtttgaagaatcaagctctaagctcgtcctatgctcctatggagtgacaaataggactcattccgactattatattgatcatcaataagagggatttctctgaaaaaaaaaaaaaaaaaaaaaaaaaaaaaaaaaaa

SEQ ID NO: 38 - DNA, 886 bp, Nicotiana tabacum
ccacgcgtccgcaatattttgactaatacactgttctgttcttcacctaattcttttcttcttctaataataacgtgctgctaagtcctaaagctcctctttggagctccaattaactccaaactaccaaaatccagagcaggtttaacaaagaatgggggttggaggacgtgaagtggcgatttcattggatggagtgagggacaagaatatgatgcaattgaagaaaatcaatactgcaattttcccagttcgctacaacgataagtattacactgatgccattgcctctggtgatttcaccaagctagcatattacagtgatatttgtgtaggttcaattgcatgtcgccttgagaagaaggaagctggggctgttcgtgtttacataatgactctgggtgttttggctccatatcgtgggctaggtattggcaaaatgttgttgaaccatatcctcaatctttctgccaagcagaacgttagcgagatttatttgcatgtgcacacaattaacgaagatgccctcaatttctataagaaatttggatttgaggttactgataaaatccaaaattattatacaaacataaccccaccagactgttttgtcctgaccaagttcatcactcaaacgaagaaatagatagtctcagctactttgattgagccttggtcaaaccttcacattatctttgaggttctgagctttctggttctagtttttgctacttatgagtaatgtgccacccattggattgttagtgtaagcccttttctgttctatcttatcctatctgcaacaacatcaaagttgaatgatttccctgtaatagaaatagtgcagttcaatgcaaacattcgagtttggttatgttagatcacg

SEQ ID NO: 39 - DNA, 1265 bp, Nicotiana tabacum
gatatcgtcgacccacgcgtccgaaagagaagaaatattaaatagcacaagaaaaatggagagtgctaatgcatattctacattgccaatggaaaatgttaacgatgttgggcttattaatttcatggacgaggctaactttgaacaatttattgagctcattaagggtgaaactgctgaccctatcgtgaagttttgccccaactatgactgtgaacacattacaggttgttttccttcgactgatgtccaatttgagccaacaccaatggatatctttgattggaatgctacaaacatatctaatcctatttcacttttttcttccctccccggagaaatgaagctccgggaagaagaagaggaggaggaagacgacaatgattacgaggaatcttctgggacaacaactaccaccaccatgactatgttgccggcaacgccaacaaagaagagcacgaggactgaccgatcaagaactttaatttccgagcgaaaaagaagaggaagaatgaaagagaagctttatgccttgcgttccttagttcctaatataacaaagatggataaagcctccattataggagatgcaatactatatgtacaaggactgcaaacgcaagcaaagttactaaaggcagaaatagcaggtcttgagtcttcctcaaatgaaatgaacaataatccatttcagaataccaagcaaatgaaattgatgactcattatcctgcaatcaagaggatatcgaagatggacatttttcaagtaggagaaagaagcttttacgtgagattagtatgcaacaaagggcgacaagttgctggttctcttttcaaagctcttgagtctctttctggattcaatgttcaaagctccaacttggctacttctgccgatgattatattttgacgttcactcttaatgtgagcgaatgtgaggtagacatgaacttggccaatttgaagctatggatagctagtgcttttcttaatcaagggtttgacttcgagacattaccattggcctaacgtttcattattgtaattgtgcagagttttaaccggtcaaagaatgagaaatgtcattatttatcggtcgtcatttgtaacttttgattatttagagtcacgtattctaaaagagtaaagtttgtcaaattgcaatggcgcgcatcgcactgtgtacatgtgaccgacctaattgtttattacggttgactttgttactactacttttggaatcaaaacagtcatggcgggcgcg

SEQ ID NO: 40 - DNA, 1068 bp, Nicotiana tabacum
ccacgcgtccgctttccacattctctcaactttctctttctaaaactcttcctctttttctagcacacagaccttcaatggcatcgccgcgcgaggagaacgtgtacctggcgaagcttgctgagcaagccgaacgctacgaggagatggtagagttcatggagaaagtcgtcggcgccggcgacgacgaactcaccgtcgaggaacgcaacctcctctccgtcgcgtacaaaaatgtgatcggagcgaggcgagcgtcgtggcgcataatctcatcgatcgagcagaaagaagagagtcgcggtaacgaagatcacgtggcctccattaaaacctacagatctaagatcgaatctgaattgacttcgatctgcaatggtatccttaagttgctcgattcaaaactcattggcaccgctgctaccggtgactctaaggttttctatttgaaaatgaagggagattattacaggtacttggctgagttcaaaaccggagctgagagaaaagaagccgccgagaatactctttcggcttacaagtcggctcaggatattgctaatgttgaattagcccctacacatccaatccgattggggctagctctcaatttctcagtgttttactatgagatattgaactctcctgaccgtgcttgtaatctcgccaaacaggcatttgatgaggctattgcggagcttgacaccctgggagaggagtcctacaaggatagcactttgattatgcaacttcttcgtgataacctcactttgtggacctcggatatgcaggatgatggaactgatgagatcaaagaaccatcaaaagcggaggagcagcagtaatgtgagtgaagcctctttgcttaggattgaatcctatggcataactttgctcattgatcgaaatttgctgtttgtgtagttctgaattccctgaattgtaatacctaaaagcactgtttcttgccatttgttgttttcagcaaagattactttttctctcggtatttcccttgtatttggatgctccagtgaaactctcttatttcgtggaaatgaatgcttg

SEQ ID NO: 41 - DNA, 1239 bp, Nicotiana tabacum
ccacgcgtccgcccacgcgtccgctccatgtttcatttactttggagttggttgctaaaacagattaaagctagctgctaagctagtactgttagagttttgttaattagaagaaactaaagagtcaaaaacagtggatccaaggcatggaaagaggggacttttcatccaatgaaatggaaatggaagagaaagagaataacgataatattgatgatcctcaacttcaagaggagctctataatatatactcagctcgatctcagcatgacatgtctgctatggtttctgtcctttctcaagttattggaaacagtaccacccattcttcttctgctaatgctactccattaaccctacctcaatctgctgtagctctccaaaaccaatctcaatctattgaggatcaagggaattcgagaagaaaaaggtatagaggagtgaggcaaagaccatggggaaagtgggcagccgaaatccgagacccaaagaaagcagctagagtatggcttggcacttttgaaactgctgaggctgcagcaattgcctacgatgaagcagctctcagattcaaaggcaacaaagccaaactcaacttccctgaaagagttcaaggcaaattccaataccttactactactactagtcaaaatcatcacttgcctgataatattgttcaacaacaatatattccaactagctccaataataatcatcctctcccttgtcaagaacattatcctagtttacatcactatgctcagctacttcagagtgacagcaatattactgatttaaacttcggtatctcgccaagttataatcagcagttatctgcttcttttgattttgcgcaatcatcatctaacagtacattatcggaattgccagcttcttatgagcagaggcaattacaatcaagttacaagcaagaagaagaagttttaatgagattttcatcgcattttggtactacttcaagctcatctggacctcatgaaagtaactgggaagagtttgaagatagaaagtcataagttcattccctagtattaagagatacgaagactgaaagaagttttatgagatttccgtcgcattttatttcgtagtttatggttttactggggttttctgtcctctgatcttgtatttcagttaagtgtaatagtagaactatatatattcatgaattaatggaaaaatattggtgtggttttatgtgtttaaaaaaaaaaa

SEQ ID NO: 42 - DNA, 1893 bp, Nicotiana tabacum
ccacgcgtccgcccacgcgtccgcccacgcgtccgatttgcttttccctcctcttctcctccattttcctttaatgtcactaaaacagaagaaggggggaacagaaaagagttagaaaatgataggagggaataatagttttgggaagacaatttgctcaatctgttatgaagatctaaatcctattattgaagacctccaatccatttctatttgcggtcacgtttttcacgagatttgtcttcagcaatggtttgaatactgtacaaatggaaaaaagaagaattgtccagtttgcaaacaggcttgttcagaacaaaatgcaaataggctttatttccaatcagttggtgatccaaatgatacaagtctgaccaagaaaccccgtgatcatgaagaggatccacgtgaactgagaaatgaggtcaaaagattggaggggaaagttttacagttgacttctactttggagaaacagctgaaagatctcaaagaagtcaatgcagagcttttcacatgcaaggaagagttgaaaatagaagcgactctaaagaatgaagctgtgaaacaggaggcagccattcagcagttgttacatcttaaatccaaggagctagatcgatcaactttggagtgcataaggctaaaagatggaaatatggctctagatagggagcttgcagcactcaagttgagttacaaagaactagtgaccaagtgcgatactcatggaaggcgagaggctcgttctcttaggaaacttgagaagtcaaaagaaaagataaataagttgaagaccagggtccaagaacttgagacggcacttgaaagaaaagaaaaagataatgaaaatttgagaactttgagagctgccaagaaaaactttgagttgtatcaaggaagcaaagaacccaaagttgaccgacgttcatatgagaatcagaataaggcacctgctgcgacagaagtagatttatgcatagtcactggctcatgcaatgatttatctagaccaaggagaaaaagaaagtctaagtctaaggaaaagagtatacaaaacacggcagaagatattataactggtggaagtcaagtgcagggatcagaaaataaggatggaatctcaggttcaaggaattcccctgttattattcttgacgatgatactgatcttccgcttctagatgatgttacacagcatcagccctcgtttcgcatcaggaaagagacttctgcaccagttatacttgcccatccaggagatacctgtttttctggtggattattaggtcctgatggtacttactggcacttgggaaaatggtgcaagaaggttaaggacaagggatctggatcactgtcttgaggactgcaaggatcaggtgtgactgctgttgatttgattgctgtaggagctgacggtagaggcggttggatcaaagttctgcgatcaatgaatccgggatcattgcaggacaaaaataagagtgtcatcagtcaagagatacaagtatgacatgaaatcaagtagttcccagtctcaaggatgcttgcatacagatagcttcttcagaagaaccagtggataaccttattaacagtgctgcttctacattaccaactgtagataatagagattaaattccttatacattgtttaggggtttaatttttagcaatctagttatactaccatttgattgaatggtccgaaaagaagaaacttaatgtcttcttttgagcatgtaaagtagggattcaaaggggaaaggtagcatacaggggagagaaaagcaagaaagcaacttcagcaattgtttcttagcggttttcagttatgttgcttgctcaatccatattgaaagtatactcttggtaaaaaaaaaaaaaaag

SEQ ID NO: 43 - DNA, 1240 bp, Nicotiana tabacum
ccacgcgtccgatcaaatcttggcaactatggcttccttattatcggtgccattgtctctatcatcctcatcaatgcaattaagactatcatcaaggatagactccattacttcaacaaccaagctagtgaaggaggagagccaagtagagctcctcagaaagttttaccaattgagatgtccttggatgagctaaatatactaactgataactttgatgagaaagctctgattggaaagggatcttatggctgcgtttttggtgctaaattaagcaatgaccaacaagtagcaataaagaaattggatactagttcttcaccagaaccagattccgactttgcagatcagttagcaatggtttcaagacttaagcatgagcattttgtgactctaatgggttattgcgtggaagcaaacaatcgaatcttggtttatgagtttgcaaccatgggcacgttgcatgatgtattacatggtagaaagggagtacaaggtgctaagcctggtctacttcttacctggaatcagagagttaaaattgcttgtggtgtagctagtggcctcgaatatctacatgaaaaagttgaacctccaattattcatcacgatgttagatctagcaatgtactactctttgatgatttcacagcaaagattgctgatttcaacttgacaacctctgaatcttcagaggactttggctaccatggtccagagtatgccatggaagaagagataacaaagaaaagtgatgtttatagttttggagttattctattggagctgttgacaggaaggaagccaatattagattataaagggcaacagagtcttgttgcatgggcaactcccctattaagtgaagataaagtgaaggagtgtgttgatcccaacctaaataatgactaccctccaaaggcaattgccaaggtggctgctcttgtagaactttgtgttcaatatgaggcagatttccggccaaacatgtcaattatggtcagggcactgaagccacttctcaatgcaaattaaactagaacctcaagcatacaacattattcttaattgaaacaagctgcagggacagttttaagtaccaacagggctgtgacccaagtcatggttccgttgccaatccaaggaaaaaggaaatcttgctaaaggactattggaatgttgttttcttaactgatttgtttaagattaaatatattatgttctcattttaaaaaaaaaa

SEQ ID NO: 44 - DNA, 706 bp, Nicotiana tabacum
ccacgcgtccggaatcgacaatgaaattcagccgcgcattcaatgccgcttcagttctcttagttcttcttcttattaccatagttacggctaagaagtccggtgatgttacggaattgcagatcggtgtgaagtttaagccaaaatcttgcgaacttaaggctcacaagggtgatagagtctcagtacactacagtggaaaacttacagatggaactgtatttgactccagctatgagaggaatgaccccattgagtttgagcttggaagtggtcaagtgattaaaggttgggatcaaggacttcttggaatgtgcgtgggagagaagcgaaagttgaagatccctgctaaacttggttatggcgagagtggatctccaccaaagattccaggtggtgctacacttgtcttcgacactgagctggttgctgtgaatggaaagagatcagcagctgatagtgaactgtgatttaacgatgtctctacactcttcattagcgacttctaaatctatttttaggttatcttatagttatatttgcttctttttgataatttagatactaaagtattggctgctggcaaaatgacacctcaagtgtgtttccttttgtcactagttttttcctctgctaaagttaagtggatggacgatgaactcccaagatggttttgccatcattacttttaaaaaaaaaaaaaaag

SEQ ID NO: 45 - DNA, 1960 bp, Nicotiana tabacum
ccacgcgtccgcgaaccaaaacttccagaacccaatatttacaacctgtcttccgccaccattgacaagaaccttaaaaagcttgcttccaagtaacaataagagaaggttgattggaaaatacatttgattatttttattagagaatggcggggactaaggaacagataatggatgttcggtctgtggtggaagcagtaacagccgccggagatgatgttgagattgatactcctctttatgttgttgaaagcctctgtatgcgctgtggtgaaaatggtacaacaaggtttctcttaacactgattccacattttagaaagatattattgtcagcatttgactgcccacattgtagtgaaagaaataatgaagtggagttcgctggtgaaattcagcctcgaggatgttgctatggcttgcatattccatcaggtgatcaaaagatgctcgaccgaacggttgtcaaatctgaaagtgctaccatcaagatccctgaactggattttgagatcccccccgaggctcagcgtggatcattgtcaacggtagaaggcatactggttcgagctgctgacggtttgggggcccttcaagatgaacggaagaaagtggatccccagatggctgaagcaatagatcggttcttgataaaactgagagcttgtgcttcaggagattcatcctttactttcattcttgatgatcctgctggtaacagctttattgagaacccgttagctccatctcctgatccctcattgaaaatcacattctatgagcgaactcctgagcaacaggcagctttagggtatcttgccgacccatcacagcttggaggacaaagtgatgaggtatcaagtgagggtataaataatgttcctcatcacctgctaaaggaaccacatggatcagttggagcaagagcaggacgtcaggctattgctcagggtaacagtgcagaaatagctgaagctctatttcgatattcagctcctgaagaggtgatgatgtttccatcaacttgtggagcatgcgctgcgaggtgtgactgtagaatgtttgttaccaatattccatactttcaagaagtaatagttatggcatcctcttgtgatgcttgtggttatcgcaactctgagctgaaacctggtggtcctatatctgataagggaaagaaaattacccttcatgtggaaaacattgaagacttaagccgtgatgtgattaagtctgatagtgctggagtggaaattcctgagcttgagttagagcttgctagtggcactttgggtggaatggtgacgacagttgagggtttaatcacaaaaattaacgaaagtcttgagagagtacatggattcacatttggagacagtcttgatgaagacaggaagagcaagtggttggacttccgagcaagactagacaagcttttgagcttgggacaaccgtggacattgatcatcgacgatgcactttcaaattcttttgttgcacctgcaaccgatgatatcaaggatgacaaacagttaacatttgaagattacgtaagatcgtgggagcaaaatgaggagctgggtcttaatgacatggacaccacctcagctgatgctgcttacagttcagcagatgctgcacccagtgagaaagctgacgattgatgaatttatgcttagtgattttctttcatactgctttggccttaaaatctaaggtaagcgttgattgttctttcatatgactgtagaagagatctagaaccataaaagattgccaacgcctgcagccatgtctacatagtggccttgtgactagaactcctttaaatagagagacaaacattttaattagctatacgggttcctttaatcaaacacttcagagttattaacaatgcaatttgttttagaagatagtttgcaatgcaatgatttttgacttgtaaaaaatatcaatc

SEQ ID NO: 46 - DNA, 962 bp, Nicotiana tabacum
ccacgcgtccggtggatttgtgtgcagcaccaggcagctggagtcaggttttaagccggaagttatatctcccagcaaagttgtcatctgataccaaggacggcgatctaccacttattgtggctattgacttacagcctatggctcccattgaaggtgttattcaagtacagggtgatataacaaatgctaaaacagctgaagtggttattagacattttgacggatgcaaggctgacattgttgtctgtgatggtgcacctgatgtaacgggacttcatgacatggatgaatttgttcagtcccagctgatattggcgggcctaaccattgtcactcacatactaaaaggaggcggaaagttcatagcaaaaatttttcgaggaaaagacacaagccttctttactgtcagctaaaactatttttcacagaagtgacttttgctaagccaaaaagcagtcggaattctagcatagaggcatttgcagtttgcgagaattactctccacctgaaggatttaatgagaaagatcttcatcgccttcttgaaaagattggaagtccatctggcacagaggacctagattgcagtagtgcatggctggaaggtcctaataaggtgtatattccatttctggcttgtggagaccttagcgggtacgattcagaccgttcatatccacttcctaaagctgcagatggaacctatcagtgtttagatcctgtacaacctccaattgcaccgccatataaacgagctcttgaaatgaagaaagcgtcgaatcaaggaatccaaaacctagacaagctttctcttagctcctaatcttaccatccagaattattccattctgtgacattggaaagtcgcttatacgtcaccaaatgtaaggactttttattgttaactgcacttgcaattaatgaatttaatgtgttttgttaaaaaaaaaaaaaaagg

SEQ ID NO: 47 - DNA, 1466 bp, Nicotiana tabacum
ccacgcgtccgtgcagaaatggcgactcgttatctgactcgttccttattcactgctctctctcgctcatacacttctctttctctctctacacctcctccctctctctcttctttttctctcctccgtcttcgaccgcttattgccgtcacagctgtcaacctccgcagcgtctctccggcggtagcaacctcctttcgagggtttgcgactcggcaaacgtcgtcgtctttaaatgacccgaacccgaactggtccaaccgtcccccgaaggagacgatcctacttgatggatgtgattttgagcactggcttgttgtgatggagaaacctgagggtgatcctaccagagatgaaatcatcgatagctacatcaaaactctggctaaagttgttggaagcgaggaagaagcaagaatgaagatatactctgtctcgacaagacattactatgcatttggagctcttgtatccgaagaacttcattacaagctaaaagaactgcccagggttagctgggtgcttcctgattccttcctggatgttaagaataaagattacggaggggaaccttttatcaatgggcaggctgtaccatacgacccaaagtaccacgaggagtgggtaagaaacaatgcccgagctaatgagaggaacaggcgcaatgaccgacctcgtaactttgataggtccagaaattttgagagaagaagagagatgcagaacactggatccaacatgggtggtggacctcccaatatgacgaatgcgccaaccccaaacatgggtgggatgcagcagcctaacatgggtgggaggcatcagcctagcatgggaggaccacagcagcccaatatgggaggtgcacctcataactacggtggagcgcctcccaataactatggtggagcgccaaacaatccaaataattttcaatacaatagtggacaaagcaacggaggcatgccttaccaaacaggtccaggaccaaaccagaattatgcttcaaatacatctggtggaaacccttatcagaatccaaacatgcctggaagagatatgccccctccaaatcagaactatgctccgaatacggctggtggaaacccttatcagaatcaaaacatgcctggaagagatatgccccctcgaaattatcaataggctgatatagataagtatgaactttgtatttccagagttctgtttcacgaaatgagaacatagctatggtgtgcttgataggatgttgctgcgtgtaatagttgaatgtgcaaaacttatatgctttgtgagtatgcaatgtcaaggtgttctcatcctattgcatcctctatgttgacatgctctctgtcaattctcctgatgagtttactagcctgaccaagaatatgttatgctttaccatgttgaatgcttgaaatttcagggcctcattgcaggtactgttcaaaaaaaaaaaaagg

SEQ ID NO: 48 - DNA, 1281 bp, Nicotiana tabacum
ccacgcgtccggaaatggcgactcggtatctgactcgttccttattcactgctctctctcgcccatacacttgtctttctctctctacacctcctccggtctatcttttctttctctctcctccgtcttcgaccacttatcgccggcgccgctgtcaacctccgcagcgtctctccggcgggagcaacctcctttcgagggtttgcgactcggcaaacgtcggcgtcgttaaatgacccgaacccgaactggtccaatcggcccccgaaggagacgaccctacttgatggatgtgattttgagcactggcttgttgtgatggagaaacctgagggcgatcctaccagagatgaaatcatcgatagctacatcaaaactctggctaaagttgttggaagcgaggaagaagcaagaatgaagatatactctgtctcgacaaggcattactatgcatttggagctcttgtatccgaagaactttcttacaagctaaaagaagtgccgaaggttagctgggtgcttcctgattcctacctggatgttaagaataaagattatggaggggagccttttatcaatgggcaggctgtaccatacgacccaaagtaccatgaggagtgggtaagaaacaatgcccgagctaatgagaagaacaggcgcaatgaccgacctcgtaactttgataggtccagaaattttgagagaagaagagagatgcagaacactggacccaacatgggtggtggacctcccaacatgacgaatgcgccacccccaaacatgggtgggatgcagcagcctaacatgggcgggaggcatcagcctagcatgggaggaccacagcagcccaacatgggaggtgcacctcataactatggtggagcgcctcccaataactatggtgggtcgcctcccaataactacggtggagcacctcccaattactatggtggagcgccaaacaatccaaccaattttcaatacaatggtggaccaaccaacggaggcatgccttaccaaacaagtccagggccaaatcagaattatgcttcaaatacatctggtggaaacccttatcagaatcaaagcatgcctggaagagatgtgccccctccaaatcagaactatgctccgaatacggctgacagaaccccttatcagaaccaaaacatgcctggaagagatatgccccctcaaaattatcaataggccattgtatatgagtatgaactttgtatttccagaattctatttcacgaaatagtaacagttgtagccgtc

SEQ ID NO: 49 - DNA, 1298 bp, Nicotiana tabacum
ccacgcgtccgcaaaaccctaaactcttcaccttcaaacatcaaaatcctctcgcattctctctagtaatggctaccgctaactcctcttctttctcacctgtatcttccccttcaaaccatgttcccctaaagcgagtaggtactcacaatggtagcttccattgagatgaagctcttggttgcttcatgattcgtcttacaaacaagttttacaatgctcagattgtccgtactcgcgatacccaggtgttggaaacgcttgatgcgggtgcttgatgttggtggggtttatgatcctagtcgagaccgttatgatcatcaccaaaagggatttcaagaggtttttggacatggtttcactactaagcttagcagtgctggtcttgtttacaagcattttggaaaggagataattgcaaaggagctccaagttgatgaagaacatccggatgttcataggttgttccttgccatttacaagagcttcatggaggcaattgatgcagtcgacaatggaatcaatcagtacgatacagaccagtcacccagatatgtaaataatactcatttgtcctcacgagttggaagactaaacttggactggattgaacctgatcagtcttctgaaaaggagaatgaagctttcgaacgtgcaatggatttagctggcagtgagttcttggatcgcgtccgctttcatgtaagatcttggttaccagcacgctcaatcatcatggagtgccttgctgcaagacacaagattgatcctagtggagagattgtagtttttactacattttgcccgtggaagcttcatttgtttgagctggaagaggagatgaagattgatcctcccatcaaatatgctttatatcaggatgataggagcaaaagttggcgagtgcaagctgtgggtgtagctcctgacagatttgagagcaggaaagcccttccagctcagtggcgaggtttaagagatgatgaactctccaaggaaacaggaattcctggctgtgtttttatccacatgagtgggtttattggaggaaatcaaagttatgaaggagcactcgcaatggcaaaagctgctttgaagctctaggcacaggaacagttttataaatggatttcagaaactgagtgatctctttatgatttaacattatagctgatcatgacatcaggttgccatttaaatagcgcattggagttgaatttattcaaggttattaaggaaactatacacaaccaggcagacagttttttacatattcagatgctatcttttacttttac

SEQ ID NO: 50 - DNA, 1121 bp, Nicotiana tabacum
agcggctggtaccggtccggaattcccgggatatcgtcgacccacgcgtccgtcttcttcttcttcttcttcttcttcttcttcttcttcttcttcttcttcttcttcaatttttctctctctctttttctctagggtatacagaaatggggatcgcaacggagaatcaaccacagcaacaacacaaggcgtcaccagaggcatcatcagaggcagataaaaagaggtggatgcttaatgattttgacattgggaagcctcttggaagaggaaagtttggtcatgtatatctagctagggaaaaaaggagcaatcacgttgtcgcattaaaagtgctgttcaagagccagctaaagcagtcccaggtcgaacatcagcttcgtcgtgaagttgagatacaaagccaccttcgtcatccaaatattttgaggctttatggttacttttatgaccagaaacgtgtgtatttgatcctggaatatgctgccaagggtgaactctacaaggagctgcagaaatgcaaatattttagtgaacggcgtgctgcaacttatgttgcatccttagcccgagccctaatatactgtcatgggaagcacgtaatacacagagatatcaagccggagaatcttttggttggtgcacagggtgaactcaaaattgcagactttgggtggtcagtgcatacctttaatcggaggcggactatgtgtggcactctagactatttgccaccagagatggtggaaagtgtggagcatgacgcaagtgtggatatttggagcctgggtatcctctgctttgagtttctgtatgggatgcctccatttgaagcaaaggaacactcagacacatatcgaaggattgtgcaagtggatctcaaatttcctgccaaaccaattgtctcatcagctgccaaggaccttattagtcagatgcttgtaaaggattcttctcagcgtctgcccctaaaaaaggtcctggagcatccttggattgtgcagaatgcagatccttcaggtgtttataagggctgatgaagacatcaccaatgactcacaatctttgtggcggactaaattgtttttgtttttcactgaaaaagcctttgctcagcgtta

SEQ ID NO: 51 - DNA, 1091 bp, Nicotiana tabacum
gtttgtacaaaaaagcaggctggtaccggtccggaattcccgggatatcgtcgacccacgcgtccgcgggaagattctcatgcaattaaccgaatcgtcaaattttcctctaaaatataaagtttctccggaaaatgtcattcatcgatgaatttcaagccaatatagaagctcttccgaaccatttacggaggaaatatgccttattgcgtgatttagataaaagtctgcaaggagtccagaggcaaaatgagcaacgttgtgagaaagaaatagaggatatgatacagcgtattaaggctggtaacgtgacaccagactcttcactaatcaaattctctgatgatgcattggatgagcaaaagcatgcaatccgaattgctgatgagaaagttgcattagcttctcaggcatatgatctggtagacgctcacattcagcagctcgatcagtacttgaaaaaatttgatgaagagctccggagagaaagagatgttgctgttgttactggaactcctgctaccactgttgaaaataatggaaagtccggaaggtctggtgaaggtaagggagggcgcaagaaaacacgtcttgctacagcagcggcagctacagccactgcagcagcagcagcaacaccaagtggaatggatttggatctacctgttgatccaaatgaaccaacatattgtttctgcaatcaagttagctatggtgaaatggttgcgtgcgacaatcctaattgcaaaatagagtggttccactacggctgtgttggccttaaagaacagccaaagggaaaatggttttgcgcggattgtgcaggaacacaaaagaagcggaaaggcagatgatagtagtagaagaaaataattcagtatactgatttaagacgttttaccaccggaaaaatttatgtagatactgtacttctgtaattttgttatgtgtagccattattaacaagtcactcttgcattctaattgtaggagggaagtacaataagtcaacaaaaaatttactcttgtttattatgaactataacgaacaaataaactattgtcttttaccaatcaacatatttgtaatc

SEQ ID NO: 52 - DNA, 1057 bp, Nicotiana tabacum
ccacgcgtccgcccacgcgtccgtttcatattcttcttcttctgcttcattgttattgtttatagaaaaaaatccaagaatggagcagttgcaagagggttttcgttttcgtcctacagattcagaacgacttatgtttttgttgagattcattgctaaacaagagatgaatgattctggatttatcacaacaaacatcgacgtctatggcagagaagaaccctgggaaatttacaatcacggcgtatcctgtggtaatgaagataatgcggactacagcagtaactatcgctatttcattacaaagctgaagaagaaaaacaaggcgaggcataatctagaggttggaaataaagggagttggaaacaacaagataagggtaaatcagttcactacaaaaatacgggaaattcatcttctgtggttattggatgcaaaaagagcttgtgttacgtgaataaacatcagtgctataatcagagcgatggacattggctaatgaaggagtacgagctttctaatgttattcttcagaaattcgacgaagattgtagagattatgttctttgtgccatcaaaaggaagtcatgttctactgattatattgagcggccattggcaagggtgcagtatcaagtgaatgatttgggggactatatgcagagcaattcagggcattatgtggaatctgaaacggacatgacgacacagaacgaggtgcccgaattagaagttcttgattatcaattagaagttcttgggatgaaaaggacttagctgatttaaattggatgttatatgatatgcctgtggtcgatcagacggtgaatattgtcgagcagcagaggaaccagaggtcagttattaataagagtgatgaattctatcagatgttggcacaaaacgaagcttttgagttctattgattaactgtatagtcatattcttggtagatgatagagatttgattaacaatggcatatgtcccactttgtagaatggaatttaagatagtagtacatctatatatctttgtataacagtatggcgcgcgcc

SEQ ID NO: 53 - DNA, 1806 bp, Nicotiana tabacum
ccacgcgtccgtctatctaagcaatttccgtagttccaaacacggtctaaatcagattccttgcttttttcatctcaaattctctactttttgttgcttcgcaacttggcttagatccttcttcatcacgctttgtaactgcttcactcaagctatttcacgatgcgatcaatgcatagatagctgaaaattcgaagtgcccggaagaaatggagaaggagtcacatggattaattataggcatctcaattggagttgtgataggagtgcttttagctatacttgcatttttctgctttaggtaccataggaaacgtcctcagatagggaatagcagttctaggagggctgccactattcctattcgtgcaaatggtgctgatacttgtacagtattatcagactcttccattggtacagagtcaccaaaatcgactatccagaatggcatgtcagtgtggcttggcggccttaggaaggcaaatgttgtttctgcttccggtatactcgagtactcctacaaggatttgcagagagcaacctacaacttcaccacattgattggtcaaggggcctatggtcctgtttataaggctcagatgtctactggtgagacagttgctgtcaaagtgctcgcaactgattctaaacaaggagagaaagaattccaaacagaggtcatgttactgggaaggctacatcatagaaacctggtgaatttggttggatattgtgcagagaagggtcagcatatgcttatctacgtttacatgagcagaggcagtttggcttctcacttgtacgatgaaaagcttgaacccttgcactgggatttgagagttcaaattgctcttgatgtggctaggggcttagagtatcttcatgacggggcagttcctccagttgtacaccgggatattaaatcatccaatattttgttggatcagtcaatgagagctagggttgctgattttgggctttcaagggaagaaatgatcagtaaacatgtatccaacatccgtggaacattcggatatcttgatcctgaatatatatcaactaggtcattcactaagaaaagcgatgtttacagctttggggtcttactgtttgaacttattgctggtagaaatcctcttcaggggctcatcgagtatgttgaactagcagccatgactacagatggaaaaggtggatgggaggaaattgcagattcccgtcttgatgggaagtatgatttgcaagagcttaatgatgtagctgcacttgcatacaaatgtgtgaatcgtgcccccaagaaacggccttccatgagggacattgtgcaggttctgtcaaggatacttaaatctagacccgacagaaagcgtcccaagcgtttttcatctgcaacagcagaggaggttaccatcaatgctgaacaaccagattatcggagtccaaactctggaccccgacgaggggaatctatggacagcccagctgactcatgtgaagtttaacccagttcttccatttgtttatttttttttttttaatttcttcctcttcttttcttcttgtaaaattggtcaggttgttaggttctccattcataacacacttctgtcttggtgcgttcgattggggtacttaggatctgttatagtctgcgtgtaagatagcctttctttctttccaattttgttaaatttttgtaaatttgcgtggaaggtaaccgaatggcagaaggaaagggtgaaaagcccagatcagccttttgtcaattctatgaaagttcatatatctttccacaaaagtgcacgg

SEQ ID NO: 54 - DNA, 1897 bp, Nicotiana tabacum
ccacgcgtccgccagcaagcacagtcgtccacaattagatattgatctgaatgtaccagatgaaagaacttttgatgaaataaattctcgagattctgctctagagttgatctctccattggaccatatgactaatcgtgctgcactgaagaatgaagtaattgattctcctgctgttcgctgttctggaggactcgatcttgatttaaatagagttgatgaacctggtgatgtagggcagtgctctgtgagtagcagtagtagattggatggtgtagttttaccttccaaaacatcatcatccattggcttgccaactggggaggtgaggagggactttgatttaaataatgggcctggtgttgatgattccagcgcagaacagtttttattccacgataatcatcagggaagcatgcgttcccaactgcctgcttctagcctcagactgaacaatccagaaatggggaatctttcttcttggtttactcctgggaatacttattcaactgtgacacttccatcaattttgcctgatcgtgtggagcagccgccattcccaatggtcacacctggtgcacaacgaatattgggtcctcctgctgctggttctcctttcaccgcggatgtttaccggagttcagtattgtcatcatcgcctgccgtgccttacccatcctccccttttcagtatcctatatttcctttcggaacgagcttcccacttccttctgcaacattttcagttggatcagcttctttcgtagattcttcctctggtgggcggctttatacgccccctgtaaattcacagttgctgggtcccgttggcgctgtgtcatctcaatatccaaggccttatatggttggacttcctgacagtagcagcaacggtaccatggatcacaatagaaaatggggaaggcagggtctggatcttaatgcaggccctggagtggtggacatggaagggagagaagagtcggtttctttgtcggcaaggcaactctctgttgccggttcacaagcattagcagacgagcatggtagaatgtatgctgtacctgggggtgttctgaagaggaaggagcctgagggtgggtgggacagtgagaacttcagattcaagcagtcatggcactaagatctgcaatctggtgattttataagctactggaggatggacttggctaactcctcaaactctcagcttctggcatgctcctgtgggtgggcggtaagtgagcaaatttgatgtgttcagagtctccgaccaccacctcttcagcttatcagtgtagttgggatttccatggtttgcaagcactgcactttggtcagctatattctctgggtggatgcagatgagttttccctctgtagatatttaactgttggaaagcttgaaatctttgatgcccagggactggggataaatcaatgttatcctgtccaaattattgacaatggaggtccaatttcgagactgaatcaaacggaaagcttttctttgtgctttgctgttaatcatctttcaatgcttcccgtgttcttggcttttctctgtcctcctttgcccattacatatgtatacagggttgacaccaaattttggtactaatgctttcatcaggcatgttttagttgttgtggctgccattgtaccataaattaaatcgttctaacgttagtttgtagtctcattcacagatgatagaactcttgttaatgatattttcaatgatggtggggtgatgtgcttgtttttctttcaagctactaatctgaaccaacagtcttgtgagcaacgaaaagacaacttctgttttctgatttggagaaattaaatgggtggagcttttgcatgggttaaaaaaaaaaaaaaaaaaaaaaaaag

SEQ ID NO: 55 - DNA, 1157 bp, Nicotiana tabacum
ccacgcgtccgcacaattcttctacagtacaagaaaccaaaaaaatggcgagtcttaaagttccaacatctgttccagaaccttatgaagatgctgagcaactcaaaaaagcttttgctggatggggtacaaatgaggcacttattattcagattctggcacatagaaatgcagcacaacgcaagttaatccgagaaacttatgctgcagcttatggagaggatcttctcaaggacttggatgctgaactgacaagtgattttcagcgtgcagtgcttctgtggactttgagtcctgctgagcgcgacgcctacttggttaatgaagctaccaaacgtctgacttctagcaattgggttatcttggaaattgcttgtacaaggtcttctgatgatctctttaaggcgaggcaggcctaccatgctcgatacaagaaatcacttgaagaagatgttgcttatcacacaactggggatttccgtaagcttttggttcctcttttaactgcattcagatacgaaggagaagaggcgaacatgacattggcaagaaaggaggcaaatatactacacgagaagatctctgacaaggcttacaatgatgaggagctcatccgaattatttctactaggagtaaagcacagctgaatgcaacattcaaccactaccttgaccaacatggcagtgaaatcaacaaggatctggaaactgattctgatgatgagtacctgaaattactcagcgcagcaatagaatgcttgaaaaccccagagaaacactttgagaaagttcttcgattggctatcaagggtacaggcacagacgaatgggaccttactagagttgtcactactcgggctgaagttgacatggaacgtatcaaagaagagtaccataagaggaacagtgttccattggaccgtgcaattgctggagacacttcaggagactatgaaaggatgcttctggctttgattgggcatggagatgcttgaatggaatatgtgttctaagattggataagaaactatttcctaatgtctgaagtttgaatttgtttgatgatgtgtggcatgtatgcccagagtttggtttgcattatatgggatttaaataatccaggtgttgtgttttggtttttaaaaaaaaaaaaaaaa

SEQ ID NO: 56 - DNA, 1860 bp, Nicotiana tabacum
ccacgcgttcgggataacatcattatccttctctcctcttcttccttctttcaaccacaattctcactcccctctttcgtctctcttctccaacttcaatcccattttcaggcaaaaagctgtcatggcttcaatttcagcagcttctgccacagctacagcttctacaaagcttgcatacccttattccccttcttcctcaagcagcagcagcaacactgctgctgtattcccttcaaattcctcaaagcttatcctttcctcttcttttacacccaccccttcaacccttttcctccactcaccaacaactactccttccaccacccacccccgtcggttcactgtccgcgctgcacgtggcaaattcgagcgtaaaaaacctcacgtcaacattggtacaattggccacgttgaccatggaaagaccacactcacagctgctttgaccatggcgcttgcctctatgggcaactccgcccccaagaaatatgacgaaattgatgctgcccctgaagaaagggcgcgtggtattactatcaacactgccactgtggaatatgaaacggaaaacagacattatgcacacgtggactgcccggggcatgctgattatgtcaagaacatgattactggtgctgcccaaatggatggggcaattcttgttgtgtcaggtgctgatggcccaatgccacagactaaagagcatattttgttagctaagcaagttggggtccctaatatggttgttttcttgaacaaacaagaccaagttgatgatgaggagttacttgagcttgttgagttggaggtaagagaattattgtcaagttatgagttccctggtgatgaaattcctattatttctggttctgcacttttagctttagaggctttgatggctaatcctagtattaaaaggggtgaaaatcaatgggttgataagatttatcaattgatggataatgttgatgaatatatccctatcccacaaagacaaactgaattgcctttcttgatggctattgaggatgttttctcgattaccggtagaggtactgtggcgacggggagagtagagagagggactgttaaggttggggaaattgttgatatagttggattgaaggatactaggaatactacagtgacaggggttgagatgtttcagaagattttggatgaagcgatggcgggagataatgtgggattgttgttgagaggtattcagaagattgatattcagagagggatggtgttggcgaagcccggaacaattactccgcacacaaagtttgaagctttggtgtatgtgttgaagaaggaagagggaggaaggcattccccgttctttgcgggttataggcctcaattttacatgaggacaactgatgtgactggaaaggttactgtgattatgagtgacaaaggagaggaatctaagatggtcatgcctggcgatcgtgtaaacatggtggttgagcttatcatgccggttgcatgtgagcaagggatgaggtttgctatcagggaaggaggaaagactgttggagctggtgttattcagaaaatcttagaatgatgaacttgcagctgagcatctcttttcacatgatcggcactttccattgaagttacttaatccattgtcatatatgcaacttcttggttacttttattatgtcttagaatcttactttagtagaagtatcctgttttaaacaccaaattctactgaacttttgggatttttcctcagtctcctctttcatttttcctttgcttgaaaggaatgagaacatttgatttcatgcactttatttaatttagaacaaatgtgcgactctgtttaaaattaag

SEQ ID NO: 57 - DNA, 1356 bp, Nicotiana tabacum
ccacgcgtccggtttttagctctgtttttgacacctataaaatgcccctctgcttcattgaactatctccttcctcattctattgacacataggaagaagaggggcgacttgttgtgtaaaagagaaaaaaaaaatgtatgcagagacagggctaatgttcccttattttcagactttcccttctgaagttcaacaatttgaagacttctgttcctctcacgaacctaatgcgtcaatgggatccaacatatcggaatatgacctcgggggagaaggggatctctttaaagctccacaaccaattattgaagaaccattgatgggccttgatcctatgactgctgctatttcaatgatttcttgtgcagaagatgccatctcgccgcaaggactcaaagtttcggatctagaaacttcgtttgagaatgaacaactcctgagtgaagttttctatgaatgcaaaaaagacctatttgacaaagatgcaattgatataccgttctctgaagtcttggacatgaaaattcctattgtgaaggccgacgaaaacctgactgcagatgagaacttggtttctcaagtatctttccagaaaagtattagttcagggtctttaacctccatggattggatacacggggcttcaatgaggcccaattttatagattttggtggaatggactttggagctgtttatggtatgcgaagagcatacagtgaaggagacataaagactctgggtaatggcaacataaatctgatccattctccactgggtcaaccacagattgtcggatgctccacttctgaaattcgcaaggaaaagctctccagataccggagcaagaagaataaaaggaattttggcagaaaaatcaagtatgcttgcaggaaggcattggctgatagtcaaccaaggatccgtggaaggtttgccaagaccgaagaaagctacacatcgaagaagcattaacagttttaactgtctctgagttggaagaattatagtaaggtagttcactggttatattagctgatgatgatataaatagcaaatggaagctagctttagaacaggatctgctcaaataagttggggatccatccatccaacaacttgctagtttgttaaaatctttggggtagcggcaataatctttgtagattagacaaatcaactagtgttgtatatagtgtttgttaaataaaattctgtagcttgctattaatgctggataatgtatttccgatatctctatgttcagcggtccagaccgttactctgtatcttactgacgcaacaatttctgtatcttactgacgcaacaattataactatgcttcagtgtatcaag

SEQ ID NO: 58 - DNA, 480 bp, Nicotiana tabacum
ccacgcgtccgctcaataactaaatatatatatagctcagattaatttatcaagaccttgtgaagatgaagacttctacttttcttgcaatgttcttggtcttaacgttggttctccaaggggaatttcaggcgagcgaggcagtgacatgcagtgcctcgcagctaagtgagtgtgtgggggcggtgacgtcgtcacaggcaccatcttcggcatgttgcagcaaaatgagggaccaacagccttgtctgtgtgggtacatgaaggatcccagcctgagacaatatgtcaatagtcctaatgctagaagggttgctaacgcctgtggagttgccgttcccagttgttaaaatacttatgtgtgcaaaagtaaaagcctttattaattactgttgcttgtactaagggaattataagcctatgttgttggccccttttacctaaataaaaaaggttgtgatgctaaaaaaaaaaaaaaag

SEQ ID NO: 59 - DNA, 1646 bp, Nicotiana tabacum
ccacgcgtccgctcgcgttttagcagccactggagaaatcaaataggagagagaaggtagtttctagagagagaaaccaaacaaaacaacaccagtttttagagagagaaaaaaagtaaaccggactattctcgaagaaaattttccggtgactgtataaattattttcaagtgaagtttccatatttgtacactcattgtcaattgattgcgttgccgtctccagattctccattaccgatttggtaattaggttttcgagatcggttggttatcatccttcgattcgttaattcgggttaacaggaattttttggtttcgattcgataatcgggttcaagtatttcagaaagagaacagaaaaaggaaaaaggaggtcttaaatctgtttggaagtgaagggggttttggttgaaagatgttgaccaccatggttggtttgtgatgtaatatggcacgggttgttacagataaagatatgtcgttttacattggtcgcgaggcttcaaagttgtggaagagattttgtgcggagataacaacagagatcaatcttcttgctgagaattggaaatatattcttggcggtttgatttgtcagtacatccatggacttgcggctagaggggtgcattactttcatcggcctggaccaattcttcaggacgtcggcttctatcttcttccggagcttggacaagatagagcttacataagtgaaactttatttaccaccatctttctatcttttgtcttgtggaccttccatccttttatttttaagaccaaaaagatctatacagttctgatatggtgcagggtcctggcattcttagtcggttgtcaattccttcggatcataacattctattctacgcagcttcctggtccaaattatcactgtcgtgagggttcaaagcttgccacgcttcctcctcctgacaatattttagaagtgctattgattgttcctcggggcgtgctttatggttgtggtgatctcatattttcttctcatatgatattctctcttgtctttgtgcggacataccagaaatatggaacacgaaggttcataaaacagtgtgcttggttagctgttattgcacaaagcttattgattcttgcatcgcgcaaacattacactgttgatgttgtggtggcatggtacacagtcaaccttgtagtgttcttcattgataaaacgttgccagaacttcctgatcgcactagtgccttgttgcttccagtgaccaaggatagcaagtccaaagaagagaatcacaaactgctgaacggaaattctggagatcctgcagaatggaggcctcgaaacgggaagatcgtggaagatgggaaaacagtgcacgttgaagcagtaattaatggtgcatagacgataaacttcatgcaacaccactaactgatgcttgcgaccttggtacagagattggtaacaatgccattataagttgtgttaatataaatcgttctgggtgttcttccaagttcaatagttttggttttagcgtaggatacgaaatcaaagattgagatgctatcgatgtctccacggtcctctgattttatcaaatgtatcatggaatttattttattttttggttaatgcaatatttcccatccg

SEQ ID NO: 60 - DNA, 1699 bp, Nicotiana tabacum
ccacgcgtccgatagatatagatacagaagagagagagagagaggtggtgggtgtgaatatggtatagggcctgagacccctgaaagggcatggaagtgctggccatgctgaggcaactcattggacaagttaaacaactcttacaacaacaaaatacacactctccttcttcttcctcctcctcttcttcttcttctaacttctcttttcctcttcaatcgccaccgcttttacacctcccaaggtgttatgttctgaatcttgatgacagttctgctgaagacagttgctacaatatcattatgactgctggaaaatctgaaaatctcaagatgttggaacctggcaagcctccaccaaaaaagaaagctcggaaggagaggaatcgaggaaaagtgactggaacttcatgctccatagagaatttggatccgcaaatatggaaagaatttcctgaagacttatttgaagctgttattgcaagactaccaattgccacttttttccgcttcagatctgtctgccgcaaatggaactcaatgctgatgtcccaaagtttttctgaacagtgcacccaagttcctcaaccacaaccgtggttctacaccattactcatgaaaacgtgaatactggagccatgtacgaccctatgttgaagaaatggcaccatcctactatacctgcactgccgaccaagttgatagtcttgccagttgcttctgcaggaggtcttgtctgtttccttgatattggacataggagcttctacgtatgcaaccctcttactaggtcctttaaagagttaccagccagatctgttaaggtgtggtctcgtgtggcagtagggatgacattgagtgggaaatcagcttacagtatcctttgggttggttgtgatggtgaatttgaagtttacgactccagaaagaactcttggactcgtccaggatctatgtcctcaaatgttaagcttcctatggcactcaacttcaagtcgcagacagtcaccatcggtaataaattttactttatgcgctcagagcctgatggaatcgtgtcctatgacatggttactgggatctggaagcagttcattatccctgcacccctacatctgagtgatcatacactagcagaatgtgggggccgcataatgcttgtcgggctgctgacaaagaatgcagccacttgcgtgtgcatatgggaactgcaaaagatgactcttttgtggaaggaggttgacagaatgccaaatatatggtgcttggagttttatggaaagcacgttcggatgacttgcttgggtaacaaaggtttgctcatgctatctttaagatcaagacaaatgaaccggctagtaacgtatgatttctcaaccggagaatggatgaaggtccccggttgcgtgttgccccgtgggagaaagaggcaatggatcgcgtgcgggactgcttttcacccccgtcttacagctttggcttaacttgggatgcccagtaaatttctagtcacagcagagtgcgatttattatatcatgtggttttagcttttcccatcataatctgcagcctagtgttctctttgctgaatttattaccactctcttgtataaacatctagttgttaagcttttcattccagaggactaatctacgactacttattattacattaaaaaaaaaaaaaaagggcggcc

SEQ ID NO: 61 - DNA, 1729 bp, Nicotiana tabacum
ccacgcgtccgccaatatcagatttctttcatgaactccacttccaatttctcattgcttcttcttcccatttccacctccaaagccatccttccagaaaaccttgttccttacatttcttagccccaaaaaagattcccatctcaattccacaaaaaaacacaaggagatctaaggaaattccccgcctctatatatagagaggtggaattgttcctgaatttggtttgaattgattgattgacagattttggtgagagggtgttattgaaaaaatgggtgacatgaaggataaagtcaaagggttcatgaaaaaagtcacatcttcttcttcaggtaagtttaaaggccaaggtagggttttgggtggttcatcttcttcaggaccctcaaatcatgtcaataatttttcatcacatcccctaaatacaaggcaagatcaacaaccttcatatacaaaaacttcgcctcaaaaaccaagtaattctgatcaaagaattgagaatatatgtgaaattcagttcaacaaaagtgaatcaaaggatggttttgatccatttggtgaattagtcacttctgggaagagaaacccaaaagggtattcacttactaatgtgtttgaatgccctgtctgtggtagtggttttgtttctgaagaagaggtgtcaactcatattgatagctgtttaagttctgaagtgtcttctaatttgggagttgaaagtaaagttgaagttaaaagtgaattggaaacatgtgttagtgcatatgtttcagggaagccctcagaagggtcagttgaagtggtcattaagttgttaaagaatattgtgaaggaaccagagaatgccaagtttaggaaaataaggatggggaatccaaaaataaaaggtgctataggtgatgttgtaggaggagtggagctattggaatttgttggatttgagttgaaagaagaaggtggggaaatttgggctgtgatggatgttccttctgaagaacaacttgttatgcttaagaatgtagtttcactcttggaaccgaagaaggttgaagagttggcgtccttatcccaagttaaggcgagtgaaccagttgagccgaagaagattgatagacagattcgagtgttcttttctgttcccgagagcgtagcagcaaaaattgagctacctgattccttctttaacctctcacgtgaggaattgagaagagaagcagagatgaggaagaagaaattagaagattccaaattattgattcctaaatcttatcgggaaaagcaggcaaaagctgcaagaaagaagtacacaaaatccattatccgtgtacagtttccagatggagcattgcttcaaggtgtctttctaccttcggagccaactagtgctctttatgagtttgtgagcgcagcgttaaaggaaccaagcttagagttcgaattgttacatccggtgcttgttaaaaagcgggtgattccccattttccagctgctggggagagggctgtaacagttgaagaggaggatttggttcctgcagctctactcaaatttaaacctatcgaaacagattctgttgtttttactggtctttgtaatgagcttcttgaaattagcgagcccctcgagaccggatcagttgcttcctcgtaagctctaaattacatcagactttgaattcttctgagtgttggaaaccttataaaactctctgcgccgggaatgct

SEQ ID NO: 62 - DNA, 957 bp, Nicotiana tabacum
ccacgcgtccggactttctgaccttgtcaaaaacctctgtgtttctctcacatttctggtcccaatctcttgatatttattggagaagacgatggcagctccaccagctagggctcgagcagattatgattatcttatcaagctcctcctcattggcgatagcggtgtgggaaagagttgtttgcttctgaggttctcagatggttccttcacaacaagtttcatcaccactattggaattgactttaagataagaacaattgaacttgatggcaagcggattaagttacaaatttgggatacagctggtcaggagcgtttccgcactatcacgacagcgtattatcgaggagccatgggtattctgctggtgtacgatgtcacggacgagtcatctttcaataacatcaggaactggattcgcaacatagagcagcatgcttctgacaatgtcaataagattttggttgggaacaaggctgatatggacgaaagcaaaagggctgtgccaacttccaagggtcaagctcttgctgatgaatatggcattaagttttttgaaacaagtgcaaagacaaacatgaatgtggaagaagttttcttttcaattgctagggatatcaaacaaaggctttcggaatctgattccaagactgagcctcaggcaatcaggatcaaccaatcggatcaggccggaacttctggtcaagctgcacagaagtcatcttgctgtggttcgtgaatggagacaatcgtgtgggaagaacgttcgttagttgcatttggatgtaaaaattgattgggatgaaaaactgattcctgttaacttcattaccaaatatttcttcgccatctgatggcaagcttgatgtgtcaaaggcttttctactgtcgttgtgaatctattgtcatgcagttaactagcctgcgttttgataaaaaaaaaaaaaaaaaaag

SEQ ID NO: 63 - DNA, 1219 bp, Nicotiana tabacum
ccacgcgtccgaataaatctgcttttggaaacattgtgttgcatccttctcttcagaggagaatagaacacctcgctagggccacagcaaacaccaagtctcaccaggcaccatttcgcaatatgctcttttatggtcctcctggcactgggaaaacaatggttgctagggagatcgcaagaaaatcgggtttggactatgccatgatgactggaggggatgttgcacccctgggtgcacaggctgtcaccaaaattcacgagatattcgattgggccaaaaaatcaaataaaggcctactgcttttcattgatgaggctgatgcatttttgtgcgagcggaatagtacatacatgagtgaagctcagcgaagtgctttaaatgctttactctttcgaacaggggaccagtcccgagacgtagttcttgtccttgcgaccaacaggccaggagatctagacagtgctgtcactgaccgtatagacgaagttatcgaattccctctccctcaagaagaagagcgtttcaaattgctgaagctctatttgaacaagtaccttgctggtgaaggagacagtgacagcaattctaagtgggggcacctcttcaagaagaaccaacaaaagaggataaccatacaagatttgtctgatgatgtgattagagaggctgctaagaagatagaaggattctctggccgtgagattgcaaaacttatggcaagtgttcaagcaactgtatatgggagcccagattgtgttcttgattctcaactgttcaaggaaatcgtagattacaaggtcgctgagcatcaccaacgaataaaactagctgctgaaggtatggagccaacttaccaggggaattaactgacaccacaaagatacaagtgtctttcactgatacgaattgttgaaaatttgtttattatctctttggtagtattgcatgcaaaattcattttttccaaacttaggatattgtagtttaggtgtactatttctgcttggggaatgagcactggatggtggacgtgtttcagggttcaatgggacgttacaatttgatgggtacatagctcacttgggctgtaattgtattgattctgtggatcgcaggaaaatacatccattgaatagataaatagtaggcaaaacatgaagtctctttgaaataggtctctgttatcaaatatcaactaacctatcttttgattacc

SEQ ID NO: 64 - DNA, 1547 bp, Nicotiana tabacum
ccacgcgtccgtatcttaatccgactccatctcctatctatctctcatacacttaacataaatccacaatcaaattccccactataacacacacccaaattataaagagagaaatttttcgttctgtggtgtttattattgtttgtgggttttgtaaataaatggggtcagaatcagatgagagggaggtgatattgggtgtagatgggggcaccacctccactgtgtgtgtttgtatgccacttcttctcttttccgaattccctgatcctcttccagttctgggccgctccgttgctggttgttccaattttaatagcgttggagaagatgtagctagagaaacactggaaaaggttatggcagaagcattgcttgatgctggtgtgaaacgatcagctgttaaagcagtgtgtttgggtctatccggtgtgaaccatccaacggatcaggagaaaatattaggctggttgaggagtgcattcccaagtcatgttaagttgtatattcagaatgatgccgtggctgctctagcaagtggcacgatgggaaaacttcatggctgtgttttaatagctggtacaggaagcatttcttatggatttactgacgatggaagagaagctcgggccgcgggtgcagggcctgttttgggtgattgggggagtggctatgggattgctgctcaagcattgattgcagtgatgagggctcatgatggtcgaggtccacaaacaatgctttcgagttgtattctacagtcactaggtctttcttctccggacgaactaatagggtggacctatgcggatccatcttgggctcgcattgcagcacttgttccagtagttgtatcctgtgcagaggatggagatcaacttgcagacgagatcttacataatgcagttcaagaattggctataagtgtcaaagctgttgtccaaagactacgcttggccggggaagatggaaaaggttccttccctgttgttatggttggaggcgtacttggagccaacaataaatggaatatagggaatgaagtcactaattctattttaaagacttatcctggagcttgtgtaattagaccaaaggtagagcctgcagttggagctgctttattggccttaaatttcttgatgaaagaaacagtagctaatggccatagttgacacctgattgtacatagctaactgtgttaactgtataatcattgaagttctctttaatcggtggttccaattctgggagggcatgtccttggatcatggtactgtacttgccttctctttccattgcatatgcagactgctaaaaatgatctgttattcaaatgaacgttgcaccaacttgttgtaacatatctttgtttcctaagttgggcagtcttttggtgctggaggagagggaaggagattgtttggtcatagttgcatttgtattgctgatggttatatagaattcataactgatcagtatgttatgtaatctcttttatagcattctctgttgggataaaaaaaaaaaaaaaaaaaaaaaaaaag

SEQ ID NO: 65 - DNA, 1446 bp, Nicotiana tabacum
ccacgcgtccgcaaaatttagaaccccaaaacaatcagtactcctcactcccaatttggccccaatttgaattcaaaatctggaagcattcatgtgactttttcattttttcaaaaactctctctcttctctccctccactctctgtgaaaccctagacacacactccatacgctctcgcaacctctacctctctcttaaatcagcaaacgacagcgatctcatgacggcggtgccgcagtctgccggaagagagctcgcaagcccacccaaggacggcatatccaacctccgattctccaatcacagtgatcaccttcttgtttcgtcttgggataagacggttcgtttgtacgatgcaagtgcgaatgcgttgagaggagagttcatgcacggaggtccagttctcgattgttgcttccacgatgattcttctggattcagtgctagtgctgataataccgttagaaggcttgtgttcaactatggaagagaggatatcttgggaaggcatgacgcaccagttcgctgcattgaatactcatatgcaaccggacaagtgataactggcagctgggacaaaaccttgaaatgctgggatcccagaggtgcaagtggacaggaacgtactcttgttggaacgtatacacaaccagagcgtgtttactctctttcccttgttgggaaccgtttagtagtagcaactgctggaagacatgtgaatgtctatgacttgcggaacatgtctcaacctgaacaacggagggaatcttccttgaaatatcaaactagatgtgtgcgatgttatcccaacggaacaggctatgctctaagttctgttgaaggtcgggttgccatggaattttttgatctctctgaggccggtcagtccaagaaatatgcatttaaatgtcaccggaaaactgaagctggaagggacatagtctaccctgtaaatgcaattgcgtttcaccctatctatggtactttcgccactgggggttgtgatggttatgttaatgtctgggatggtaataacaaaaagaggctatatcagtaccctaaatatccttcaagcattgcagcattgtcatttagcagagatggtagactcctggctgtagcatcaagttatacatttgaagagggagaaaagccccatgagccagatgccataattgtccgcagcgtaaatgaagttgaagtgaagccaaagccaaaggttttgccgaatcctacctcatgaaaactatttcagaagctcctcgatcctctcgagtcgactagtttatcttactttggaaaacaaaaaaactcttatgtacttaatatttcaatttgacttccaggactcatttctcgtagctggaaattctggagaacagtgataaatttgtaattatccagttagcaattgtacctttttcgatgaaaaaaaaaaaaaaag

SEQ ID NO: 66 - DNA, 2834 bp, Nicotiana tabacum
ccacgcgtccgtcgcctacatttgagcatgtcctgccccctcttcgtagctgcacctctcctctgaaactcgagaaaaagtacaacaattttaagcttcagagatgctcgaagtatatagaagcagctcagttgagtggaagccgtcgccagtagtagccctagctactagcgccgacgattctcaggtcgccgcagctcgagaagacggctctcttgagatttggcttgtttctccttgctccgtcggctggcactgtcaacttataatacatggaaatcctaattctagggtttcttcgttagtgtggtgtaaatcggggtcgagaaggttggatgcaggtcggttattttcgtccagcattgatggatcagtttacgagtgggatcttttcgatttgactcagaaggctgtgctagattccattggtgtttcaatatggcagatggctgtggaaccatgcaatacttcgcagcttcatcaaaatcttccaaggcagtatgagaatggccatgttaatcatacaaatggtgttagtagtgataatgagagcactgaaggtgaagatgatgatgactcggttgttcttcatgaggatgatgatagtgaaaatggtcaaattgcatttgcttgtgacgatggttgcgttcgaatctacactactgatgagaagaatatgacttacaaaagatcattgcctagggtcagtgggcgtatattgagcgtcacttggagttctgatgcaaagaggatattttctggtagtagtgatgggtttataagatgttgggatgccaagttagcatatgaagtctataggataacagttggacttggaggtttgggtagtgaatctgaactatgcatatggtcattgcttgcgttgagatgtggtaccatggttagtgcagatagtactggtagcgttcagttctgggacacccatcatggcactcttttgcagtcacattcaagtcataaaggtgacgtgaatgctttagcagcatcacccagccataggagggtgttctctgctggttctgatggtcaggttataatttataagctctcaaccagtgaggttgggtctcatgatggagatatttcttctgtagacatgaagaaatgggtttatgttggttatgtgagggcccatacacatgatgtgagggccttggcagttgctgtacccattgctcatgaagagcccgtagctgaacataaggcaaagaagcagcgttccggggagaagccccttgattttagttaccataaatgggcacaattgggtgtaccgatgcttatctcaggtggtgatgacactaaactttttgcatactctgtaaaggaattcaccaggttttctccgcatgacatttgtccttcacctcagaggccacctatacaacttgcagtaaatacaattttcagtcaggcttctttactcttagtccaggctgcgtactggatagatattttttgtgttcgtgtaaaaaagggcgttgtgtctgatagctgtggccagtctggcggggctgcgagaacagatctagtggctcgtgttaagtgcaaaacttcgaggaagatcacatgcagtgcaatttctccttcaggtgtaatgtttgcttattccgactatgtaaaaccctgtctttttgaacttaagaagagtggtgctagcaagagtccatggactgtcagccgaaggcagctccctctgggactgccatttgcccattcaatggttttcagtgcagattcttctcgaatgatgatagcagggcgtgacagaaacatctatgtggttgatgctgtaagcttggaactagttcatgttttcacacctcgtcgtcaagagcattacgaagaattgctaccaaatgaacctcccattaccagaatgttcgctagtgccgatgggcagtggttagctgctgtcaactgctttggagatgtgtatatatttaatcttgagacgcagaggcaacattggtttatatcaagattgaatggttcttctgttacagcgggtggttttactcctcgaaatagcaatgtgcttatagtatccacatcttcgaaccaagtatatgcctttgatgttgaagctaagcaactaggagaatggtccaaccggaatacattctccctgccgagaagatttcaagaatttcctggagaagtgattgggctttcttttgctccttctgctaattcatcatgtgtgattgtctacagttcaagggcgatgtgcttgattgactttgggttgccagttggtgatgatgacgataccaacttagctaatggtcaagatttagctttgacgaagctacatagtactcctgcgaatgggaccttaaagcgcaagccgatagggaatgacttagatatgaaacaaaatggtagaaagaattttgaattctgtgcattcagggatcctgttttgtttgttggacatctttcaagaacttccaccttgatcatagacaaaccctggattcaagtggttaaaactcttgatgcactacctgttcacagacgtatttttgggacataaatctttatcacagtttttgttacagctttactaggaaacgttccgaggggtgtattcaacccctttcactcatatattcttctttgttgtttgttgaagttcgggtggggaaaaagttgaaatcaacactcaagttcaatatagcttcacttcatccgcaggagttctcctatggaaattgcgtagacctgtaaatatacttatgagctttaactagtgtccattagtctgttcagatattgattaatgttttcctgtataacatttattcaag

SEQ ID NO: 67 - DNA, 1312 bp, Nicotiana tabacum
ccacgcgtccgcctctgagtacccttgagaagtcagagatcgatcttattcgctgccgggagatctgattacttcacttgttttgttcttttaggaaagatatcggatctgaccgtcaaacaaagtaaaagatgcaggatcaggaagggcatgtggctgatgcaggaaaagaaacattgacatctgttcaaacatctgaaattgaagattggacaaaatacaaggatgatgatattatgcaacagcaatcttccatccaggctgaacaagctgtaaaaactcaatttgttggcgataaggaacctttgtcttcattagaagctgaataccatctgggaaattcaattttgctggagaaaataaaggtgctgagtgaacaatatgctgtccttagaagaacacgtggagatggaaattgctttttccgcagtttcatgtttggttaccttgagcacattctggaatcacaagatcaaagcgaagttcatcgcattaaagctagtattgaggaatgcaaaaagacacttcaaagtttgggctacgcagaattcacatttgaagacttttttgcgttattcctcgagcaactcgataatgttcttcaaggtagcaaagattccataagtcatgaagaactcctacgcagaagtcgtgatccgtccatttctgactatgttgtgatgttcttcagatttgtaacatctggtgaaataaggaagcgctcggagtttttcgaaccatttatactaggactaacaaatgcctcagtggagcagttttgcaagtcatcagtggaacccatgggcgaagagagtgatcatgtgcagattatagccctatcagatgcgttgggtgtaccaatccgtgtcgtatatcttgatagaagctcatgtgagaacaacagcatcaatgtaaatcaccacgactttgttcctacaagcgatggcatggggaatagtggtgtttccaagaccacaaatccatctattaccttgctgtatcgcccaggacattacgacattctctaccccaagtgatgttcttcatttaggggtcgtttggtttgaatacagtttatgtcgggataagttatactggtataagttatgctgggattagttatgctaggattgttttttatccattgtttggtatgttgtattaaatatgacaattgcataatctgtaagaagattgtataccggtgctaattaccccaccctcgataaggtataagttatcccggtgttaattttaatcctgggataacttatacgtggtttgctaaccaaacgaagtattaaggtggcat

SEQ ID NO: 68 - DNA, 1271 bp, Nicotiana tabacum
ccacgcgtccggaagaaacgaagccggagaagagggctcttcttttcgtggagaagaacaattataggagtattatcttatacttattcttaccaaagatggatcggtaccaaaaagtggagaagccaagggcaggaacacccattgatgagaatgagattcggattactagtcagggtcgcatgcgcagctatatcacctatgctatgaccttgcttcaggaaaaaggatcagatgagattgtgttcaaggcaatgggcagggcaatcaacaagacagtgaccattgtggaattgattaagaggaggattgttggtcttcaccaaataacgtctattacatccactgatattactgatacatgggaaccccttgaagaaggccttctacctctcgaaaccaccaggcatgtctcaatgatcacaattaccctctcaaaaaaggagctggatttgacttctgtggggtaccaaccaccattgccagcagaccaggtgaaagtgttgacagattttgactatgatggaggatcacctagtggtggacgaagaggccgcggtggtagaggaaggggaaggtctagaggtttctcaggaaatggctttatgttggctgaatacgatgatggcgggtttgatcgcaatcggagctatggtaggggtaggggtcgaggcagaggtcgtagcttccgtggccgtggaaggggagggtacaatggtcctcaggatgcccagcaagacgctgacttctacaatcaagaagcacccatgcagggccgaggccgcggacggggaaggggaactcgtggtaggggacgcggtttcagaactaatgggccgatccatggcggtggtgcttaaagatcaaactttgaagaatacagagattatgtgctatgagtgcctgctccatgttctatgttttttttcccttcagttgttacccgtgttaacagtaggttattgatctgtaatcagagtagactaattatagatttcattaccgcccgtatgtggtgagtttttttgttttttttcttgatatcttctagtattttctttctggtagattaggtgcttgatcaagtgtaatttccttagtgagcagcacattctttaatttgtctgtgttagacatgttcagtgttgacctcagtgcgtaaatttgcctctgtttttagttggcagaatactcaaattacataatttctgctgcgttttatacttctttaactattgaaagtctttgcttttacaaaaaaaaaaaaaaag

SEQ ID NO: 69 - DNA, 2328 bp, Nicotiana tabacum
ccacgcgtccgaacagaagctgatcttgtatatatcgtagacgatgacatgattccagggaagaaaatgttgcaaattttagcacatgtagcagggatagacaagtacaagaattctgttttgggaagcattggtaggattttgccatttagacagaaggattttacttttccgagctataggaagtttcgatcaaaggaagcagggctttatttgcctgatcctgcttataatatcactgttgacagaattgttcaggtggatttcctctccagttcttggtttctttcttctgaactagtcaagacacttttcatcgaaacgcccttcactttcatgacaggagaagacttgcacttaagctatcagcttcagaagtatagaaatgctggatcatttgtgctgccagttgatccaaaggacaaagaaacttggggtgacagtgagcacagacttgcttatgtatccgaaaccactgttatattcaaggacactgttcaagtccgagacaatcaatggtggaaagcactctccactggttatgtaacacaatgggcagcaatgaatcctcagaaaattgatgcacttttctatgcccactctgtcgatgaagttaaagctctcgcgcctcttcttgagaaattcaggtcaactgttggaaagaaggcctacattgttgtctcaggaggcagcttctgcccgtgcgaagatgctgttacagctttgaactggcctaaggttgtatgcaaagaaagaagattcaagattatggatttaggagttggtgctctatcaagtatttcaaattcagaagtgcccgtcgttcaagcagtctatgctagcatgaaaggactaatcaacattcataacccgattcttgtgatcacggtagctgatgcagatcctcatgtgaagaaagcactcaagatggctatagaagctaacaccaacagttcatctttagtccttttacctagatcatcggtcactaagcttctttggatggctgatcttcggtccacagcattgccaaattggaatcgtatgaggctttccataaatatcatcacacagaatagagctaattcactagcaaggcttctcaaggctctcagcgacgcatactatataggcgatgaagttcctattactttcaacatggatagcaaagtggatgaagcaactataaagcttgttaactcattcaattggcctcacggacctaaaagtcttcgaagaagaatcatccaaggaggtctaattcgagctgttagtgagagttggtacccttcatcggatgatgattttggcctattactcgaagatgatatcgaagtctccccttactattacctctggatcaaatatgctgtcttggcctaccactatgaccctcaaatatcacttcctgaactctcatcgatctctctttacacgccacggttggtggaagtggtaaaagaaaggcctaaatggaatgcaacagatttcttcaagcaaattcatccaaacacaccttatctccaccaattgccttgtagttggggtgcagttttctttcccaagcaatggaaggaattctatgtttacatgaacgtgaggttcactgaagatccaaagcaaaatcctgttcagataccaaaatcaagaacaaatggttggcaagcttcttggaaaaagtttttgatagatatgatgtacttaagagggtacgttagcctttatccgaactttccaaatcaaacgagcttttcaacaaatcatatggaaccaggtgcacatattgctgctaaagagaatgtggttaagcataacaaggctgattttgaagtgccattgttaaaggaagatttcaagaaccttttgccaaatggaaaaatgcctccggtaacaaagttgccttcattgaacctcttcaatcagcctgtttctctaaagggattaaaagcagcaggagcaaaactagggaaagatgttattcaatgcagtccaacggagatagtagccgttcaccacgacacaggtttaccttcacattgtgcaagattctgaaaactccatactcgtccgatgatcacaaattaattcttttgttttctctcccaaatttgccatgttacattacttggtggaaatgacagttaggaattggtgggagagaaagatgagggtttgattcagctttatttctcatgcaagtaaggggaataaggattctttatgaatgactactgatgagaatgtactcttgtaatattgcagccaaaattggctttctgtatcatcttcttttgcctcattttgcaatcaatgaaagtagacacatca

SEQ ID NO: 70 - DNA, 1045 bp, Nicotiana tabacum
ccacgcgtccgtggtggcaaatcattctcttcttcgcggggttcttcatcttcgtcgagggggtattctacgaggagagcagatcctagtttttcgtattcagttccctattatgcgccttctccttttgggtttggtgggggtggtggggtttatgttggcccagctgttggttttgggtttgggtccagtgcctttcttatcatgatgggttttgctgcttttgttttggtttctgggtttctctctgatcggtctgaagggggcagtgtgcttactgctactgacaaaactagtgttctcaagcttcaggttgggttgttgggcttgggtagatcactccaaaaggatctcaaccggattgcagaagtagcagatacatccacatcagagggtttaagctatgtgttgacagagacaacattagcattgcttcgacaccctgattattgcatctcagcttattcatctgttgatgtcaagaggagcatggaagaaggggagaatcgattcaatcaactttccattgaggagcgtggtaaatttgatgaagagacacttgtgaatgtgaacaacattaaaaggaaaagttctacgagccagagggcaaatggatttagcaatgaatacatagtggttacaatcttggtagctgctgaaggcgtttataaattgcctactattaatggaagtggagaattgaaagaagctttgcaaaagattgcatctattccttccagtagaacactagcagttgagattttatggaccccacagaacgaaaatgacacgttatcagaacgagaactccttgaggattaccctctcttgcggcctctgtaagaaaactgggatttcatgcttttcttttactttctaaagatcatataggctgctctcaaccactttttgttatcttcatgtatatagctcgtagagcatcgataatacttgtgtaagaatgagaccaaattttcctaattgtactagtaaaattgttatataaaatgaccagattctccttaaaaaaaaaaaaaaaaaaaaa

SEQ ID NO: 71 - DNA, 976 bp, Nicotiana tabacum
tgtacaaaaagcggctggtaccggtccggaattcccgggatatcgtcgacccacgcgtccgcccacgcgtgcgcaaattcgcggtgatgaagaaaatggttactcacaaagctatcaaacagtacaaagaggacgttttgaaccctaataagaaagatttgactaaagaaaagctccccaaaaacgtgccttacgtttcgtctgcgcttttcttcaagtacaacacagctctgggaccgccttatcgagttctggtcgatactaactttatcaatttctccattcagaataaattggatttggagaaaggaatgatggattgtttgtatgccaaatgtactccgtgtataacagactgtgttatggctgagctggacaagctgggtcagaagtaccgtgttgctcttagaattgcaaaagatccccgatttgaaaggcttccctgcactcacaaaggaacatatgctgatgattgtattgtcgagagagttactcaacacaagtgctatattgtcgcaacatgtgatcgagatttgaagcgtagaatacgcaaggtccctggtgtaccaatcatgtacattactcaacataaatactccattgaaaggttgcctgaagcaacaatcggtggagctccaagatattgagtacgtgtttcgagcagtcaaacaatggaatttccaagaccttggatagtggttcgaattcccatcacggctgtcgctgcatagattaccagatctcggtgcgttgtgcaacgaaaaatgctgaagtatcagtcgaatctcaattttgtacccggtggattgttatgtgttcctcaatgataaagaaatatgttcgattttgtttagttagtatctctaggtgctgcccccgtgtgtcttaattaaacagccaatagcggtgtcctaaggcattccaaacagaactataatccatgcctcctttaatgtgtaagggggtggttatcaac

SEQ ID NO: 72 - DNA, 981 bp, Nicotiana tabacum
gtacaaaaaagcaggctggtaccggtccggaattcccgggatatcgtcgacccacgcgtccgcccacgcgtccgcaaattcgcggtgatgaagaaaatggttactcacaaagctatcaaacagtacaaagaggacgttttgaaccctaataagaaagatttgactaaagaaaagctccccaaaaacgtgccttacgtttcgtctgcgcttttcttcaagtacaacacagctctgggaccgccttatcgagttctggtcgatactaactttatcaatttctccattcagaataaattggatttggagaaaggaatgatggattgtttgtatgccaaatgtactccgtgtataacagactgtgttatggctgagctggagaagctgggtcagaagtaccgtgttgctcttagaattgcaaaagatccccgatttgaaaggcttccctgcactcacaaaggaacatatgctgatgattgtattgtcgagagagttactcaacacaagtgctatattgtcgcaacatgtgatcgagatttgaagcgtagaatacgcaaggtccctggtgtaccaatcatgtacattactcaacataaatactccattgaaaggttgcctgaagcaacaatcggtggagctccaagatattgagtacgtgtttcgagcagtcaaacaatggaatttccaagaccttggatagtggttcgaattcccatcacggctgtcgctgcatagattaccagatctcggtgcgttgtgcaacgaaaaatgctgaagtatcagtcgaatctcaattttgtacccggtggattgttatgtgttcctcaatgataaagaaatatgttcgattttgtttagttagtatctctaggtgctgcccccgtgtgtcttaattaaacagccaatagcggtgtcctaaggcattccaaacagaactataatccatgcctcctttaatgtgtaagggggtgttatcaaccttgt

SEQ ID NO: 73 - DNA, 1500 bp, Nicotiana tabacum
ccacgcgtccgcgaggcaacagatgaagcaggtgtgttgttaactatgagcacgttgactgaagatggcgtgatttcggtgaagaatgcagcttgtgagaggttactgaatcagagggtggaattgaaaatgaagtcgaaaaagttgaatgactgcttgaaccgcttccatgttgctatgccaaaaccacgtgaccagaaagagaggccagcatgcatacctcaggcagtgttggaagccagagctaaggaggctgaggcagatgctgagaaacagaaaaggaaacttgagagagatctggagaatgagaacgggggtgcaggtgtttactctgccagcttgaggaagcactatctattagcaaaagaagagtggaaggaagatgtaatgccagaaattttagatgggcacaatgtctacgactttattgaccctgatatcttacaaaggcttgaagaattggagagagaagaaggtcttcgtcaggatgaagaaggagatgatgattttgagatggacggcgttgagctgacccctgaagaacaagcagcattagctgaaattcggaaacagaagagtttgctcattcaacagcatagaattaagaaaagcaccgcagagagccgacccactgtaccaagaaagtttgacaaagacaaggagttcacttcaaaaagaatgggaaggcagttatctgctttggggctggatccaactctagcaatcaatcgagcccgtagtagatcaaggggtcgtaagcgagagagatcagttgaacgtggagatgacattggtaaggatgcaatggatgtcgacaagattactcccaacaagaagcaaagattgaggtcactttccattacggcaagatcaaggtcaaggtcacgacctccagatgaatttgttccaggggagggcttaaaggacaaagcccaaaagaagatggctataaagatggctaagggttcttctaagaagaggaataaggatgctcggcggggagaggctgatagagttattcctactctgaaaccaaaacatctcttctcaggaaagcgatcaactgggaaaactgaccggcgctagtaaaccaagatggcattttatcttggaatttgctgatggtacctgtcaagatgcttgtgttgcaatatcttgggtggcggacagaaaggctaaaagaaaactcagcttgtgaggaagatgtcaagaattcaatctattgaaatggcaagaccaagactacagattaagtatttaagtttgtgcttaagatgcagctgaacttgctgcctctattatgcatttttggaacttagatacctgttgtaagattgtgtttatcccgatgttaaattttgtctcagatttttttgattttctttagtacagcctttcctctcttttttgcatcaactttctgtttacacgccctaaaaggcgtattcagaaaatgtattcatctgccaatctccttgggatgttttttttttttgggaa

SEQ ID NO: 74 - DNA, 1957 bp, Nicotiana tabacum
ccacgcgtccgattgttaattactgcttctgtccccacaccacttaagagcacctcattcatggcttctcccaactcactcaccactttctgcattatccagtgctcattttgctgtaaactacagttatttcttagctgaaaatccaagatttgctgttaattcttgacccttttgccccttcttggattttctgttatttttggattcttttttgtgtcttgaagcaaaggaaggcagaaaatgagaggaggggtcagtggaagtttcaaacttgagcttctggttgtatttatactgcttctttgtatccgagactccaattgcagctcactgaagcatctaaaaggctctctattcaaggacataaaggaggacactcttttgccagagatctccccaaatgctgctccacagccccttcttcccctatttgcaccttctccattggcacctttcacaaacagcactttacccaaattatctggactctgtacgcttaactttgatgctgtgagaagtatgatgaccgtgacatcaatagattgtgtagcaccatttgcacagtatctggctaatgtcatgtgctgccctcaactggaaacaactcttgttattcttattgggcggtctagtaaaaaaacaaatatgcttgcattaaatgggaccctcgcaaagcattgcctttcagattttcagcaacttctggtgagccaaggtgccaatgatactttgcagcatatatgctctctccatccgtctaatcttactcaaggttcttgcccggtcaaagatgttcatgagtttgagacgactgtggactcgtctagcctacttgctgcctgtggcaagatcgatcttgtgaatgaatgctgtgagcaaacctgccaaaatgctatatcagaagctgctaaaaaacttgcacttaaagcatatgatcttttaagcatggatggctctcatgtgctggctgatcacacgaccagagttaacgactgtaaaagtattgtacaccgatggttggcaagtaaacttgaccctgctggagcaaaagatgttcttagaggactttctaattgcaaaaacaataaagtgtgccctctggcttttcctggcatgaaaaatattacaaaggcttgtggagacgggatgaataaccaatcaatatgctgtaatactgttgagaggtatgtctctcacttacaaaggcagagcttcgtcaccaacttgcaagctttggattgtgctgcttcacttggtcttaagctacagaaagccaatgttagcaaaaatgtctacaatctctgtcacattagcctcaaggatttttccgtacaagttgcaccagaagtttcggggtgtcttttgcctagtttaccgtcggatgcaatactggaccaaagtacggggatcagttttgtctgcgacttaaatgacaatattccggctccttggccatctatgtctcagttaccagcttcgtcatgcaataagtctgtgagaattcccgcacttcctgctgcagcatcgggccaaatcagtaaaggattaaatatatggtcacatatgctactgatggcgtcgatgatattgggaatctgctgtatatctaatgctgccaatcttgcttattagctgtattttgtggaagcacattttgaccagaaagaaaattcaaaaattacagttctatgaaggtctctgattgacatcaaaacttaaaatgtacagatgcaggaaaatcatgcacctgagtgaaaatccaactcagagatgattccaagatcaaattcgcgacgaaatttttattccctttctttgggcaataagaaagttgtgaaaaaaattacacagcaggtttagtttcatgtaattatttccacttgacatactttgcctttatgtatttggaattcctcagaaaaaaaaaaaaaaaaaaagggcggccgctctagag

SEQ ID NO: 75 - DNA, 1685 bp, Nicotiana tabacum
acagtttgtacaaaaaagcaggctggtaccggtccggaattcccgggatatcgtcgacccacgcgtccgggatcaagaccctatattgcgttatggtggaatgtatgctttagcattggcttacagaggaactgcgaataataaagctatccgtcagttgctgcattttgctgtatcagatgttagtgatgatgtccgccggacagcagttttggcacttggatttgttatgtattctgagccagagcagatgcctcgtattgtatcgttgttatcagagtcttacaatccacatgttcgatatggtgcggctatggcagtaggcatttcttgtgcaggtactggtctgagtgaggccatctcattgttggagcctttgacatcagatgtggttgattttgtacgtcaaggtgctctcatagcgatggccatggtgatggtccagataagtgaagctagtgattcccgcgttggtgccttcaggcgacaactggagaaaattgtcctagataagcatgaagataccatgagtaaaatgggtgcaattttggcctctggtattcttgatgctggtggaagaaacgtgacaatcaagttactttcaaagactaaacatgacaaaattacagcagtcgttggactagctgtttttagtcagttttggtattggtatccacttatatatttcgttagcttagcattctcaccaacagccttgattggtctcaattatgacctaaaagtgccaaagttcgagtttgtatcacacgctaagccctcactatttgagtatcctaagccaaccactgtagccaccacaacttctgctgtgaaacttcccacagctgttttatcaacatcggctagggctaaggcaagggctagcaagaaagaggctgagaaagccattgccgagaaggcagctggaacagagtcatcttctggtgcaccaagttctggggagtccatgcaggtggatactccagcggagaagaaaaatgaaccagagccatcatttgagatgttgaccaaccctgctagggtggttccagctcaggagaaatacataaagtttttggaagaaagcagatatgtgccagttaaatcatcaccttctggatttgtgcttctgagagatctacgtcctgatgaacctgaaatattgtccctcactgatgcaccctcgtcaactgcatccagcactggtggtggatcaactggacaacaggccccggcatcagcaatggctgttgatgaggagcctcagccaccaccggcatttgagtacacatcgtgatttatttgtattttaaaagcttcaccaatactttggttttcattccattttggagacgatgttgaatggcagaggtggaaacctatggatcaaatagcacttcctatgatcgagttgaattgtgggatacattgaaaagagccccgtggatactgttattctgcctcttgatttccagacttgtgcttgtgcttgtcattgtatttcctatgcaagagggactcaaaaactggggactggaaactgccattgcgcgttatctttttctgaatctgtcacgtcagctctgtctggactgttagatttttactttatgttctaattaagattttatattgttcggatctacaaaaagatttccactgttctccccgagtatttatagtcc

SEQ ID NO: 76 - DNA, 1456 bp, Nicotiana tabacum
ccacgcgtccgtaaaaccctgcggcctatcggtttatcttctccctccatttccactgtaccatacaatacaatggccaccacttcccttagaacgcccaccactaccgtaaggccgccgtccacccccgtcagcgcctccgcggtgaaacccaattgtatcactttcttatcctacttacaccgcagacgggggcagactgcactacttccccgacggtgtcgtattcaccactccgctaacacaattgttcagctgccgcaccggtcggttgagaaatttatagtctttgcttcaaatggggatgctgctgaggccgctcaaaccgagactcaggaacctgagcaggaggtacaagaatccgagcaggaggagaatgtagatggtgctgctgctgaagatgcttcggatgagggtgacaatgcagctgcagatgaaactgcatcattcattgcaacttcattgcagttgtacagagatgctttagcaaataatgacgattcaaaagttgcagagatagaaatttccctcaagtccatagaagaagagaaaattgaacttcagagaaaagtagcctcattgaccgaagaactgtcaagtgagagcgaccgggttcttagaatcagcgctgacttcgacaatttccgtaagagaacagagagagaaagactttctcttgtgaagaatgcacaaggggaagttgtcgagaaacttctatctgttctggacaattttgagagggcgaaaatgcaaatcaaggtggcaacagagggagaagagaaaattaataatagttatcagagcatttctaaacaatttggggaaatccttggatctcttggtgttgagactgtggagacagttgggaagccattcgacccattgctgcacgaagctataatgcgtgaggattcagaggaatttgaagaaggtgttgtattagaagaatatcgcaaaggtttcaaacttggagacagactcttacgtccttcaatggtgaaggtgtcggctggcccagggccggcaaagccagagacagcggagcctaaagaagagcaaaacgaagtcgaggagaagagtgaggaaggtactgctgaaacagcaggtgatgaagggacaggtgaaggaggtaactaactaccagtgatgatgtgacaagtgagggatgtaacctgtgatttctcttttgtacaagcaaagaaaaggacatatttcctggtttgattgaggttgagataggtttttgctggtatacctttcaattttcattaactactgtttatctgaaaggacatcattttaggtcagtcggcttatgactgctgtcttaaacactattttttgaggctttggatagttgaggattcatatagtcgatcccaactagcttgggatcgaggcgcaattgttgtaatactccggaaacaagagcgtaatgtcatatgccagactgaca

SEQ ID NO: 77 - DNA, 1198 bp, Nicotiana tabacum
ccacgcgtccgaaatatgccagggattatttctcgtccgagatgatgttgatgggcaattactacaataaccttggaatgaatttcaatgtaaataataatggcggcggaggaggagggatgttgttttctgggaatccaagtgcgatgacaaacagtggacggagtagcatcaataattcagtaatgagtcagtctggaggttgttcgagttctttttttatcgattcagtgccggggctcaagcatgatactgggctggcggtagagtggacccttgaggaacagtacaaactggatgaaggacttatcaagttcgcgaatgaacccagtataatgaagtatattaagattgcagccgcgctccgtgacaaaactgtacgtgatgttgcattaagatgtaggtggatgacgagaaagcgcagaaaacaggaggactatagtttggggaagaaagtgaaagacaggaaggataaatcagcagaagcatccatgaaaactggtacatcctcagcttcgccattgagcttcattccatattcactctcctcaaatcatcgtaaccatggtgaaaatatcccttctgcagcattacttggaacgagacatctactggaagaaaacaatcaggctctcaatcagatttcggccaacctttcaacagtcaagttgcaggacaacattgatctcttcatccgaacgagaaataatataacggcagttttaaacgacatgagaaatatgccagggattatgagccaaatgccaccccttccagttttgttgaatgaggaacttgctagtagtgttttgcctagtatgactcagccgatgatgtttggctccacaagtggaatccagctgaaacaagagccaggctgctgatgcaaaacgcttggtgttaaatttggattactagcttgtgtaagtacaccaaattttttgctgtaaatgcataaaaagctggcaggtctttgcagcttgggtatacgactgggttccacgggaagaacatttatgagaacctgttttttggaagctgaacatctgaacacaagcaccaggaaatagcagcctcgtgttattgcatatcaggggaaaaactgttatcttgatactgcacttacaagcatttttcttcttcttgtttcagccttctgtgtgtaaatttaggggataaatcgatctcaaaatcgatt

SEQ ID NO: 78 - DNA, 1790 bp, Nicotiana tabacum
ccacgcgtccgcggacgcgtgggcgcgaactcagattctcaataatggcggcatcgtacgagtacgaagacggaggtttccaacagcaaccggattcagccgggtacgacccgaattttgtgccggattcggtaaaatcgttcgtggttcatctgtacaggcacattagggagaaaaatgtttacgagattcaccagatgtacgagtcctcttttcagactttaagcgagcgtatgttcaaggaaactccatggccttcagttgatgccgttgcgccttacgttgataacgaccacgttttctgcttgctataccgtgaaatgtggttccgtcacttgtacgctaggctttctcctactcttaaacagcggattgattcttgggataattattgcagcctttttcaggttgtgctgcatggtgtggtgaacatgcaattgccaaatcagtggttgtgggacatggtagatgagtttgtataccaattccaggcattctgtcaataccgtgcaaagatgaagaacaaaactgcggaggagattgcattgctgaagcaatatgaccaggcttggaatgtctacggtgtcctcaacttcttacaagcccttgtagagaaatctacgataatccaaatattggagagggagaaggaaggtcttgaagagtttactgctactgatgggtatgattacagtggtggaagtaatgtcttgaaggttttgggttatttcagcatgataggcttgctcagagttcattgtctgttgggtgattatcatactggcctgaagtgcttgcgtccaattgacataactcaacaaggtgtttacaccagtgttattgggagccacataaccacaatttatcactacggctttgctaatcttatgttgaggaggtatgtagacgctatccaagaatttaacaaaatccttctatatatttataagacaaagcagtatcaccagaagtcaccccagtacgagcagatactgaagaaaaatgagcagatgtatgctctgttggccatatctttgtcactgtgccctcaagtgaaacttgttgaagaaactgtcaattctcaattaagggagaagtatggtgagaagatggcgagaatgcaaagatatgatgatgaggcttttgccctctatgatgaactcttctcatatgcatgtccaaagttcattactccctctgctccaagttttgaggagcctcttgtaaattacaaccaggatgcgtataggctacagttgaagctcttcctttatgaagtgaagcagcaacaattgttagctggtgttaggacctttttgaaagtctattcaacaatctccctggggaagcttgcaaattacatggaagtggatgaacccactttaaggacaattttgatgacatacaagcacaaaacacatgctgtcgattccgatgggaagataacttctaatgctgatgtggacttctacattgatgaagacatgatccgcgtagtagaatctaaacccgccaagaagtatggagattacttcttgcgtcagattgtgaagcttgaagggatcatgactgatattgacaggataaagctggagtaagctatcttcctatgttctagtattagtgctagcttattttgagctttcatttttgtactcgaaagcaagaaggaaaatgcataaagtggaaaaagtatacattttgttgttccccctctgagactgtgttaccggaagttgttgataaatgaccagttaaatccatttttttctaaaaaaaaaaaaaaaaag

SEQ ID NO: 79 - DNA, 1381 bp, Nicotiana tabacum
ccacgcgtccgcccacgcgtccgcttttccatcagatttcagctcttttactccacagctgcagcaactacattggtggactttctggtaaattcacttggcttctccaacaaagaagccatttctacaagctccaaggtaactcgttcgacactccgaaattatgagccacaattgttacttgatctctttcacaaagtgggtatgaataaaacccagatcaaaaccctcgtttcttcttcccctgaattgttgttttctcatattgataaaaaccttaaacccaaaattatggttttacaagaaattggcttatctgggtctgaccttgttacatttatcaataaaagcgatttcttgatgagaggtttacatactactattaaaccaagtcttgattatcttcgggagtatttgggcagttatgatgctgtagctagggttattaagaaagagcctaggctgctttccagtaatctccctaaagtaataccacccaatatactattgttgcaaaatcttgggttttcgctaggggatattgagacggtttttcatcggcgtcctaggtatctgcttaataaccctgagtggcttgagagagtagtaaatcaagcagaaaagagttttaacgtacctcgggagtcacggatgtttcttcatgccattgaagcacttgtgtcgcttgatgaatcaaaattagaaaggaaattagatattttccggagttttggatggtctgattctgatatctgtgcaatggtgcgaaaacttccttactgtttgacttcatcagaggctaagataagaagtacattgaaatttttcatgaccgaacttgggtatgaacctagttatctggcttctcatgcaccacttttaaagtacagtatggagaagagggtcaagccaaggaatgaaatcttgaagtttcttaaagaaaaccagctgataaaagggaaactaagtctttacactgccgtgtcatctcctgaatcacgatttcgtaagaaatatgttcttcctttcaaggagaagatgcctgagttgtatgatttatacatcaaaaatacaagctaaagagaggtcttcacagtgtgacagtggctgcagagcagtgcttgtttaagaggtttattcacttcttgataattttgtactttcattttggtgctcttttcaagcatgttgctagtttacctttcattgttgattatacatttatcaaaaaattactgagctatgaaaactagaaattgaggctagtctcattttcaaatcaactgatgtttcttgtttaatgggaaggaaagaagtgtagaaaccagacttgatgtatatgccattgattataaaaaaaaaaaaaaaaaaaaaaaaaaag

SEQ ID NO: 80 - DNA, 1583 bp, Nicotiana tabacum
ccacgcgtccgcccacgcgtccgaaaaaaagtaaaccggactattctcgaagaaaattttccggcgactgtgtaaattattttccagtgaagtttccatatttgtatactcattgtcaattgattgcgttgccgtgttcagattctccattaccgatttggtaattaggtttcgagatcggttgtttatcattcttctattcgttaattcgggttaacaggaattttttgatttcgattcgataatcgggttcaagtatttcagaaagagaaacaaaaaggaaaaaggaggtctaaaatttgtttcaaagtgaagggggtttaggttgaaagatgttgaccaccacggttggtttgtgatataatatggcacgggttgttacagataaagatatgtcgttttacattggtcgcgaggcttcaaagttgtggaagagattttgtgcggagataacaacagaaatcaatcttcttgctgagaattggaagtatattcttggcggtttgatttgtcagtacatccatggacttgctgctagaggtgtgcattactttcatcggcctggaccaattcttcaggacgtcggcttctatcttcttccggagcttggacaagatagagcttacataagtgaaactgtatttaccaccatctttctaacttttgtcttgtggaccttccacccttttattttcaagaccaaaaagatctatacagttctgatatggtgcagggtcctggcattcttagtcggttgtcaattccttcggatcataacattctattctacacagcttcctggtccaaattatcactgtcgtgagggttcaaagcttgccacgcttcctcctcctgacaatattttagaagtgctattgattgttcctcggggcgtgctttatggttgtggtgatctgatattttcatctcatatgatattctctctagtctttgtgcggacataccagaaatatggaacacgaaggtttataaaacagtgtgcttggttagctgttattgcacaaagcttattgattcttgcatcgcgcaagcattacactgttgatgtagttgtggcatggtacacagtcaaccttgtagtgttcttcattgataaaacgttaccagaactgcctgatcgcactagtgccttgttgcttccagtgaccaaggatagcaagtctaaagaagagaatcacaaactgctgaatgggaattctggagatcctgcagaatggaggcctcgaaacgggaagatcgtggaagatgggaaagcagtgcacgttgaagcagtaattaatggtgcatagacgacccactaactgatgcttgcaaccttggtacagagattggtaacaatgccattacaagttgtgttaatataaatcattcctggtgctcttccaagttcaatagttttggttttagcgtaggatacgaaatcaagtcaaggattgaaatgctatggatgtctccacggtcccctgtggttaaatttaatgttatcaaatgtatcatggaattcattttattttttggttaaaagcaattattttcttatttccaaaaaaaaaaaaaaaggg

SEQ ID NO: 81 - DNA, 1401 bp, Nicotiana tabacum
ccacgcgtccgcccacgcgtccggcaacaacagcaacagcaactcttgaaggctattcctcagcagagaaacccacttcaaccgcaatttcaaccacagaatcatgctataaggtctcctgtaaaaccagcttatgagcctgggatgtgtgcccgtcggctgactcattatttgtatcagcagcaacacagacctgaagacaataacatagagttctggagaaaatttgtcgccgagtattttgctccaaatgccaagaaaaagtggtgcgtctctatgtatggaagtggccggcagaccactggagtttttcctcaggatgtatggcactgtgaaatatgcaaccgcaagccaggccgtggttttgaagcgaccgctgaagtcttgcccaggcttttcaagataaaatatgaaagtgggaccttggaagagctactctatattgatatgcctcgtgaatatcagaattcatctggacaaattgtcctagactatgcaaaagcaattcaggagagtgtttttgagcaacttcgcgttgtacgtgatggtcagcttcgaatagtgttttcacagcctgatctaaagatcatctcttgggaattttgtgctcgacgtcatgaggagctaatccctagaagattgttgatacctcaggtgagtcaactcggcgctgcagctcaaaagtaccaggcagcaacccaaaatggatcatctactgcatctgtttctgagttgcagaataactgcaatatgtttgttgcctcagctcgtcagttggcaaaagctttggaagttccattggtaaatgatctaggttatacaaagagatatgtgcgatgccttcaggtatgcaccttgttctgatgctggaaggtttttattttggcccttttctggaatttggagacattccgcttgtatcaatgtggatatcactacaaattcttgaaatatttgcttctgttagtgcttttaacttcccgaccaggtcatggtttgcctgttctgtgcgtgatatctgactcaaccagttctatccaactttcttatcctctccggcccccctctccttttaatctgtcatcttcccgtggaattcaaagcaaagctgaaaatgaaggtcgaaattcagatttctagcatgtagcagctcagacaaccaagaggttgtgagttcgagtcacccaagagcagggtagggagttattggagggagggagccgagggtctatcggaaacagcctctctacccaccccagggtagggctaaggtctgcacaaactaccctccccagaccccactagtgggattatactaggttgttgttgtaatattggaaattcctactggtaaatctgactcatgagttaatgtgtgaagtagacggaatgatgtggcca

SEQ ID NO: 82 - DNA, 1755 bp, Nicotiana tabacum
ccacgcgtccgctgacgcgtgggttccactacatcaagacatctactacactcatcttttttgcacttattgggtgtaaatttttgaaacccagttgagaaaaatgagtgtgttacaatacccagaagggattgacccagcagatgttcagatatggaacaatgcagcatttgataatggagattctgaagatttgtcttcgctgaaacgttcttggtctcctctgaaacccctttcggttaggccatcagattcctttgaatctgatttgtcaagtaaggaaaatcaaactcctttatttgagaattcatctgttaatctctcatctccgttacccataaagccacttaaccctaatggggctctggaaaattcaagactcaagccgaacaagcccaattccaaacagagtcttgatgagatggcggctagaaagagcggaaagggaaatgatttccgtgatgagaagaaaatagacgaggaaattgaagaaattcagatggagattagtaggttgagttcaagattagaggctttgagaattgaaaaggctgagaaaactgttgctaagactgttgaaaagcgaggaagggttgtggcagcaaagtttatggagccaaaacaaagtgttattaagattgaagagcgtatatcaatgagtgcaagaacaaaggtggagcagagaaggggtcttagtttaggaccatctgagatttttactggaacgcggcggcgagggttgagtatggggccatcagatattctagcagggacaacaaaggcacggcaattgggaaagcaagagatgattattactcctattcagccaatacaaaacaggcgaaagtcgtgtttttggaagcttcaagagattgaagaagagggaaaaagttcaagccttagtcctaaatcaagaaaaactgctgcaagaacaatggttacaacaaggcaggcagttactacaattgcatcaaagaagaatttgaaaaaagatgatggacttttgagttcagttcagccaaagaagttgtttaaagatctcgaaaagtctgctgctgctaataagaagccccagaggccggggagggttgtggctagtaggtataatcagagtacaattcagtcatcagtagtgagaaagaggtctttacctgaaaatgataaggatgagagtaagagaaatgataagaaacggtcgttatctgtagggaaaacgcgtgtgtctcaaactgagagcaagaatttgggtactgaaagtagggtgaaaaagagatgggaaattcctagtgagattgtagttcatggaaacacagagagtgagaaatctccactaagcattattgtgaagcctgatttgcttccgcgaattaggattgctcggtgtgtgaatgagactcttagggattctggacctgctaaaagaatgatagagttgataggcaagaaatcgtttttcagtagtgatgaagataaggagccacctgtctgtcaagttttaagttttgcagaggaagatgctgaagaggaataatgtgtaataaagggagctgctaactcttttcatgctctttcaattttcaatcctgccttttaatttttgttcattcgtgccttttaattgaatggggaagcattcttttgcttcctcaaactggtattctagcttctgaattacattgtatggtacaatatgaataaggttttgtcttccggcaggttgtccaagttagtttttagcttaaaatagatgcggca

SEQ ID NO: 83 - DNA, 877 bp, Nicotiana tabacum
ccacgcgtccgctttcacaaagcattgtgtgttctgatgggatggaactatctggcacctcctgataactcgaagtcatatcagatgttatctgctgatgaagcaactgcaaaccgagatgatctagttttgtggccccctttggtaataatccacaacactatcacaggaaaacgtgatgatggccgcatggagggtttgggaaacaaggcaatggatagttaccttagaggtattggatttcacaatggaaaggtgaaggccttgtataacagagaaggtcatctaggtgttactctggttaaatttccaagtttaatggatgccatgcggttagcggaatattttgagaaagataaccgcgggagaaaaggttgggctcgactgcagcccgtgactctaggcaaggatgacgagaacaaccctgaccttgtcaaggttgatcataggactggagagaagaagagagtcttctatggttatctgggaactgttagtgatttagagaaggttgatttcgactctcgaaagaagattaccattgctagccgatcagattatgtgacatctggttagaaccacttgaatagctttacattaagatgtgcttcagttgagaattttagtcaattccctgctctagatattctggctttgtgttacttttattgcccttaggaattggggcagctttctctgggataactgtggagctaagttataagtgccatgcatgcgtcttcccctcttctagtgaatctttctgcctagattagcagttttaaagtccaatggactcgctgattgttcttgtccttgtcccgccttcctcggtttgaggctgggtgtaccatttgggtttcgaaaagttcaggca

SEQ ID NO: 84 - DNA, 948 bp, Nicotiana tabacum
ccacgcgtccggccgaaaacaatgggaagaggaaagttcaaaggaaagcctactggtcgtcgccagttctccactcccgaggagatgattgctggtacttccgctcgacgtcctcgcacgtttaggcaggaagaggctgaacttgaggaagaagagagatctgaggagtctgaagaggaatctgaagaagattctgatggagagaagaagaaaggtactcagggtattattgagattgagaaccccaatttggtcaagccaaagaacgtgaaagctaaaaatgttgatattgagaaaacaactgagctttcccgacgtgaaagggaagagatagagaaacagcaagctcatgaaaggtacatgaggctgcaagaacaaggaaaaacagagcaagctaggaaagatttagaccgcttggctctcatacgacaacaaagagcagaagctgcaaaaaagcgagaggaggagaaagctgccaaagaacagaagaaggtggaagctcgcaagtaacgaatagtaccatgaaatgttgttttcaattctcctagtacaagatatatccctaccattattggctaatgatggagtttacacttccacctttcgttcatgtcctgtctagtttaaatggagaagagttctctatagaggaaatcatgaaattatactttaagctctgattctgtacacaaaatagatttgtttggccaatatgatgggaggatttaccagtccttttgttgggttgaaataaggttattgcgactaattaaactatcttgcagtgtgtgtgctatgaggagaaatactttccatggaaaatgtttctaaggaaagtggttttttaaaaacttattttcctgtgtttgcttggtgtgtggacgcacgatctttgtatccctgaggtgctttttcaaaagattggaatatataatggtttgagcaggc

SEQ ID NO: 85 - DNA, 1041 bp, Nicotiana tabacum
ccacgcgtccgctgctatctgatattagaagtatattggcaacgacacagatgtggcctttatatgttctcgttgagtaagttttcaaggacagaagaagaatactctcaaggatctggaagggatcgtttaagcttggtagagtccttcctttgtaaacgatcagttggcacaaacaaatgccacaatacagtcctctcatgttcgtacttttgtgaagttccacatattaaccagttacattcatgggactgtggtcttgcttgtgttttaatggttttgaggactctcggtaaggattatgatatgcaagaacttgaagagctttgctgcactacaagtatttggactgttgatctggcatatttgaggcagaaattttctgtcaacttttcctactttacagtcacattaggagcaaatccaagtttctgcgtggagacattttacaaggagcaattgtctaatgatctggtccgagttgatatgctattccaaaaggcacgtgatactggtattaatatagagtgcagatcgattagcagtgaagagatttcttcattgatcttatctgggaaattcattgcgattgctttagttgaccagtacaagttaagtcactcttggctggaagatattggtatatcagacttctgcaatgacaacccaggctatactggtcactatgttgtcatctgtggatatgatgctgatacagatgagtttgagattcgtgatcctgccagttcaaggaagcatgtaaaggtctcctcaaggtgtttagaaggggcccgcaaatcatttggaaccgatgaggatcttttactgatccgtttacagaaggaagagactgaaagcagccctttgtgatcgtttatttatttgtgtatgaatgattgtttctctctgactttgtccccgctgcgtattgcccatatcgggtattctttagctgtatgtatattatgtacatcaagggctgtagtatcatgaatttcgcttccctgtatcatgaattttgtatatgatgcttggagcacc

SEQ ID NO: 86 - DNA, 2031 bp, Nicotiana tabacum
ccacgcgtccgacttgattctctgctctccccttgactttcacacactcaaattcattttcatatccactctcaaatccagaaatgcaaatcccccatccccacccctccacccccatctccgacgccttcgtccacaagcgcggtaaaaaacgcggtagctacaactgcggccgatgtgggcaacccaaaaaaggccacgtttgccatatctctaacgaccttaataatcatacagatgttcctactcccacaccgaccgatgccaaatcatttgttctcccttctccgctatccgttattcgtcctcagcaacttccacctccgccacgtcagccacttccccagctccggcgagcgctttctttcgatgacgtggatgtcagcgatgatgagtcgcctgtatctgatgatgatgacgtggattgtttggatctggagagtgagttggatttaggtgggtccgggaagttacccgcgagtgctttgtgggaagtgcttaagagattgcctccatcagcgctgctttctgcggcgaaggtgtgtaagggttggagggatgtttctagaaggatctggaagtcggctgaggagctaaggcttggagttcctgtgaaagctcagattgggcttgttggatcagtgttgcagaaatgccctggacttgttaagctttcacttagaatggaaagtgatgtggacgcaacgatgctggcttgcattgcattttcctgccctaatctggattcaatggagatccttacttcagatacctcagttaatcggatcacaggggatgaattaggccgttttgttgctgacagaaggtgccttaccaatctcaagatggaaggctgctcaaatcttggggcctttactctttcttcaaccagcctttccactctttgcctttcggatctcttttgtcactctaagatggtcttcaactgccccaatttaaaggagatttccctggatttttctcgccaagagaaggatagcactgatcttactgctatggtagatggtcttggaaggagctgcccaagactacagaacattcatgttgcatctgttcggcttacacatgctgttgtgcttgctctaacagcagcaaatttaaggggattacgaatgctttccctagtactagggtcagaaataactgatgcatctgtcgctgctattgcatcgagctactcgaggcttgagttacttgatttgagtgggtcaagtattagtgacagtggcattgggatgatatgcaatatatttccagagacattgtctaaacttctccttgctctttgtccaaatatcacttcaagtggcattcaatttgctgcagctcagttgcctaatctagagataatggactgtggaatgaccatatgtgatccagatttagacagtccaacaactcaggaaaatgataacggcgaattacaaagaacaccgattagtaaattacaccttatatatcagaaactgattatcaaacacaaccgcttaaagaaactcagcttgtggggttgctctggcttagatgcattatatctaaattgcccagagcttaatgatttgaacctgaactcctgtacaaacttgaatccagaaagattgctacttcaatgccccaatctggaaagtgtgcatgcatcatgctgtcaagacacattggttgaaactcttcagaatcaggtttgtggtgattttatggctggagacaatcattttccatccaaacgtcttcctgatggctcaaaggatcagagttcctcatttattcagcccccagccatttgatgatgagaagagaaagagaaggatttcaaagcgacggtgcgcggtgcttgtttattagtcaaatacttgtcttgtattggctttgttgtactctagaccaattgtccattatttgttatatagtgatctgaggctaaggcctgatcatgtaattttcattgattaaactatactcaacgtcaatacagggattgtatttcctctatcaataaaaagtacagcagcc

SEQ ID NO: 87 - DNA, 2149 bp, Nicotiana tabacum
ccacgcgtccgtctcaatccaaacttcgagttcacatttgccctagctttgagaaatgatcatttgcaaactcaaattattgaattagatcataatagaatccgtaatatacccaaattgtattgttttgttttgatgtgtgttgtgaaaatactgtaaattttgaacaattcgattatggccgatggtaaggtggttaagcgtgtcaagtacaaatcttcagtcaaggaccctggcgtttctggcgttttgaagttgaccaaggaacggtttttctttatgccgaatgacccaacatcaacgacaaagcttaatgtggagttcaagttgattaaaggccacaggtcttctaaagagggttcaagtaagcaggctcttcttaatctcatgcacgatcagggcaggaattatatttttgagtttgatagcttcccggaccgcgacaagtgtcgagaatttgttgcctctgcaattgcggtttgtggagaagttgtgaaagctgcttctgaaaaacctgctgttccacatgatgaacaactcagtgcagcagaaatgggacgtcggattaagttactgcaggagaatagtgaattgcagaaactccacaggcaattggtcattggaggtattctatcagaggctgaattttgggccgctaggaagaagctactggaacagggcgatatcaagaagccaaaacaacgggtggctttaaaaaacgacatgtggagtgtaaaacctttatccgatggccagacgaacagagttacatttaacttgacaccggaggttattcatcagatttttgctgagaaaccagctgtccgccaagcatatttgaaatttgttccgggcaagatgtcagaaaaagaattctggactaaatattcaagagctgaatacctccacagcacaaaaaatattgttgcagcagctgctgaggctgctgaagatgaggagcttgcggttttcttgaagcaagatgacatgttagcatttgaagctcgtaagaagatcagaagggtggatccaactctggacatggaagcagatgaaggtgatgattacatgcatctcccggatcatgggctacctcttgatgaaactaaggagattctggaaccacagtatgaaccattcaagaggtcgttctcgcagtacctcaaccagcatgcagcagtagttcttcgaggaagagttatagatgttgagctgggtgacacaagatctgttgctgaagcattcatcaggacaaatcaggctgaactagctgccgaagtgtctgatgagagtgcatatagagaacgcatagctaaagtttctcgagttgctgaaattgaggatcttcagggacctcatgagccaccagttgcattgctaagtatcaaggatcctcgggattactttgattctcagcaagcaaatgcaataaaggctttgggggatgctggtacagggacaagacagctgaaatttagtgtgagcaaagaagaagccttttgctccttgaagaactccatcttcgagataaattcacaaggattgatcgaaccaataattagtccagaagtagctctcaaggttctcaacgggcttagtcagaatatctcgagtacaaagtatcatctgggaaagaacccccatgagagtgttttagataggctgcctagtgcaacgaaagatgaactattactccattggacatcaattcaggaattattgaagcacttctggtcatcttatccaataacggcaaaatatttctacaccaaggtgactagattaaaggatgcaatgtctcagatataccccaagttgcaggagatcaaggaatctgtgcaatcggatttcagacatcaagtttcccttcttgtacagccaatgcttcaggctttagatgctgcctttgcccattatgatgcagatatacagaagagatctgccaaaagtggggagagaccaaatggatttgcttaggcaaaatttttctccattttcatccgatatttaagctctttgttttctgggggttatatacacgaatgtacatttaacaaaattttgttcgagtgtgttatagcatattctatatcttgacagttctaattgactgcctgcggtaattgtacatctagtggaataatggttg

SEQ ID NO: 88 - DNA, 889 bp, Nicotiana tabacum
ccggtccggaattcccgggatatggtggacccacgcgtccgctctttggatgttatggaaggatcaaagtggaatatgactcgaagtggcttttgtggaatgcggtctaaaaagtttgatggcttcatcgatttggatggatatgacacgatagcgcttaaacttaaaggagatggaagatgttatatttctactatatacacagagaattgggtcaatactcctggacaagatgaagataattcatggcaagcattcgtttttgtgccaaaagaaaactggtatattgcaaaaatcccgcttactcgttatgtacctacttggagagggaacatgataaatgcaaagttggagatgaatccagctcgaattcttggcatgtctctatctgtcaacgcagaaggtggagttccaggtgccaagtctgggcctggtgatttccaagtggaagttgattggattaaagccttgcggatgcagtaagcaaaaggggaacatcttaaagaattattagaataggctgggacatttggggcatccacgctcaccagttgagcaagattgtggaaatgccattcagagatggagaagatacaggttctttttctatgtaccttggaggaaaagagagaattgagctgaggaaaggagtgaaaccttaaaatgcagtgactacaggccacaccaccaagtcaaattatcagatttttttcttgtaataaatggggctcttcaatttttctttaggctatcaactagtatggtaaactaagcagtatgtttaataattatatcctcgtctgttacaaggtttggcaatcaaataatacaacaatgtgcttggaatcggtagtactgttaaaagatttaatgtcaatgtgcaatgcgc

SEQ ID NO: 89 - DNA, 1098 bp, Nicotiana tabacum
ccacgcgtccgacctcttcacctttacaaacttctacaaatatatttacttcaaacaactgagtagtcctattgtttctgattcgatgtcggttagaacagtgaaagtgagcaatgtctctcttggtgcgtcggagcaagatatcaaggagttcttctcattctctggggatattgagtatgttgagatgataagtgagaatgagcgatctcaaattgcatatgtcacattcaaggatccccagggtgcagaaactgcagttcttctttctggagccacaattgttgatcagtctgtcatagtagccctggaacctgactacgagctgcctcctacagctccagtgccaatcaaggcaactgagagggctaatgcagctggtggtggatctgctattcaaaaggcagaagatgttgtgagcagcatgttggcaaagggcttcatcttgggcaaggatgcagttaacaaagcaaagacatttgatgagaaacaccagttcatatccactgcatcagccaaagttgcttcactagatcaaaaaattggacttagtgagaaaatcaatatgggaacaactattgtgaatgacaaagtgaaagaaatggaccagaagttccaagttactgaaaagacaaaatcagcttttgcagctgctgagcagacagttagcactgctggatcagccatcatgaagaacagatatgttttgacaggggcatcttgggttactggtgctttcaataaggtcaccaaggctgcaggggaagtgggccagaagacgaaggaaaagatggcagaagaagaacagggaagaagttcagctgcaggttacgtgcctatacatgctttctcggagtccccaaaagcttccaaaaccgaggaacctgccaagccctcttcacctaagggcctaattctctagcttgtgcaaaaatatttcaaaactattgttcaattccgcttgtctgatcttttagctgtcattgtgttgtggttagacttagatatgctagttatacataaaatgtcctgtacgattgttgatacatggaacgatagttgctggactattaaattccctgtcggagtgctgtgcgg

SEQ ID NO: 90 - DNA, 1009 bp, Nicotiana tabacum
ccacgcgtccggagagtaaaagtggatcctatgaggaagagcgtcagtttgaacaatctctcacagtacgaacagccaaatgctaacaacagcgctgatacatctaaagtggctgaggaaggatatgcctctgcagatgacgctgttcaacaccactccaacagcggtcgcgagcgtaagcgaggagtaccatggacggaggaagagcacaagttattcctattaggattgcagaaagtggggaaaggagactggagaggaatctctagaaacttcgtaaagacacgtacaccgacacaggttgcaagtcatgctcagaagtacttcctccgacgaagcaacctcaaccgtcgtcgccgccgatctagcctctttgatatcaccactgactcggtatcagctatgccaatagaagagggaaaaaataagcaagaaatcccagttccaccagttgtagcatcatcaccaacattgcctactactatagaggctaccaaaaccaatgcatttccagtggcacctatcatgttaccagcacagattgatcagtcaagagaaagtccaactctgttgcaacgaaatcaagtgaattcgtatacgccagttcgccctcttcctatgctttcaatgcccaatccatcaacagtatttgaccttaacgtgaaccagatctcagaagtcgaaccattgtcactgagattatccttgtcacttgatcagggacaagcatcatctactagacaccactcggcatttaaagtaatgccaagcttcagtaatggagagagcatcattagtgtggcatgagatcgaaggatctgtgagaaaaaaatgaaagcaatatggaaagtaaaaataggacaagagtgggtacgctgcactcataattatattaagggaatgtttatttaaggagagattaattgactagacatttggtcctgatttgtacagaccagaaatatgtcatgccttgtggttacctgtttaatgcaacgagtatactgac

SEQ ID NO: 91 - DNA, 1868 bp, Nicotiana tabacum
ccacgcgtccgactttttccactgagctccactccaatgtgtaaaaccctagctaaaaatctttaaagttagggtttcaaatttgcaatggggaactgctgcagatctccggcagctgtcgcaagagaagacgtgaagtcttcaaacttctccggcaacgatcacggccggaaagacaagtccagcgccggaaaatcgcaaaaaccggtaaccgtgttaaccgatgtgaaaaattcgaacgttgaagagaagtatttagttgatagagaactaggcaggggcgaattcggaattacatacctttgtatagatcgtaacagtaaagagcttttagcttgcaagtcaatttcaaaacggaagctacgaacagctgtagatgtggaagacgtgaggagagaagtagccataatgaagcatttgccggtgaattcaagtattgtgagctttagagaagcttgtgaggatgaaaatgcggtgcatttggttatggaattgtgcgaaggtggggaattgttcgataggattgtggcgcgaggacattatactgaacgagctgctgctgctgttacacggacgattgtggaggttgtgatgctttgtcataagcatggtgtgattcatcgagatttgaaacctgagaactttttgtatgctaataagaaggaaaattcgcctcttaaagctattgattttggcttgtcaattttcttcaagccaggtgagaggttctctgaaatagtcggaagtccctattatatggctcctgaggtgctcaaacgaaactatggaccagaaatagatatatggagtgcaggagtcattttatatattttgttatgtggggttcctcctttttgggccgaatctgaacaaggtgttgctcaggccatcttacgtggggtgatagatttcaaacgggaaccctggccaagtatttcagagagtgctaaaaatcttgtacggcaaatgctggaaccagatccaaagcttcgactgactgcaaaacaagtacttgaacactcttggcttcaaaatgctaagaaggctccaaatgttccccttggagatgttgtgaagtcaagacttaagcaattttctttgatgaataggtttaagaggaaagctctgagggtgattgctgatttcttgtctaatgaagaagttgaagacctcagagaaatgtttagcaagatagacaccgataatgatggaattgtttcagtccaagaactaaaagctggacttccaaagctcaactcacagctggcagaatctgaagtacaaatgcttgttgaagccattgataccaatggcaaagggaccctggactatggagaatttattgctgtttcactccatcttcaaaggatggctaacgatgaacatctgcacaaggctttctcctactttgataaggatggaaacggttacattgaaccagatgagcttcgagatgccttgatggaggatggagcagaaaactgcgccaatgtggcgaatgacattttccaggaggttgatacagacaaggatgggcgcatcagctttgaagaatttgcggccatgatgaaaactgggacagattggagaaaggcttcacgacattattcaagagggagatttaatagtctaagtgtgaagctaatgaaggatggatcgcttaacttgggaaatgagtaaggtttacattttttcatcaaaatgaagtattgtatcgatgtgtatttgatctcgatgtgtatttgatctctcgccattgttttctggggtgcccattagattgtttgcttgccaggatggaaaaggggcgacttcatctgggtaaccgttgtaaccatttgaaacacagaatgtatccttctactccc

SEQ ID NO: 92 - DNA, 1755 bp, Nicotiana tabacum
ccacgcgtccgcttggacttggttacaaaaacagtagccttaaatagtccagctactgcccttgccttgtacatgcaatgcaagtacaggctgccgccatggcgaatttctcaccgttgctattaacgacgatttggctagtgcttgtaatttgtaaaggagtagagagtggtcattcctcagctgttggagatccaggaatgataacagatggcttaaggatagctttagaagcttggaacttttgtaatgaagttggtgaagaagctcctggaatgggtagccctagagctgctgattgctttcatctttctgacagttctctgactcacaaggtaaccgagtcggataataagctaggagttggcaagacattccctggcctgagtcctaaggctaagaataatccggacttatatgctgttgaaaaggaactctatcttggttcattgtgtgaagttgatgacacgccgaggccatggcaattttggatgataatgttgaagaacggaaattatgacacaaaatctggtctttgcccagaaaatgggaaaaaagtgcccccttttaatcctggaagatttccttgttttgggaaaggatgtatgaatcaacctatcttgtatcaccagcccacttcattattagccgatgatattatgcggggaggttttaatggtacctatgatttgggttcttcaacgggtggcagtagttccttctttgaggtgctctgggaaaagaaagttggcacagggggttgggtatttcagcacaaactcagaacctccaaattgtatccatggctgatgttgtatcttagggcggacgcgaccaaagggttctctggaggctaccactacgataccagaggaatgttaaaaactctcccggagtcacctaattttaaggtcaaattgaccttggatgtgaagcgagggggaggaccgaagagccagttttacttgatagatattggcagctgctggaagaacaatggtgctccatgtgatggagatgtgctcactgatattaccagatacagcgagatgatcattaatccagaaactccagcttggtgcagccccacaaatattggcaactgcccaccttttcacatcacaccgaacaatactaaaatctacaggaatgacacctctcacttcccttactcagcttatcactattattgtgctcctgggaacgccgagcacttggaaaagccatatagtacatgtgatccttacagtaatccccaagcacaggagctagttcagttgctgcctcatccaatatgggcagactacggctatccaaccaaacaaggagacggctgggttggggatggaagaacatgggagcttgacgttggtgccctttccagcagactttacttctatcaggatccaggtacacctcctgctagaagaatatggacatctctggatgtggggactgaaatttttgttagcaacaaagatgaagtggcagaatggactctgagcgactttgatgttttaatcacctcgtaaagccataataatgatacccttctatttaacattgtaactgtagccaaagcaaaatcagatagtgggacaaggtctcatcattcttgatgtctaaactttatctttctatactagatctgatctgacggggcaagtcctggcagctttatttccgagagaagaaaaaagaattttgtttttgctttaaaaaaaaaaaaaaaaaagggcggccgctctagagtat

SEQ ID NO: 93 - DNA, 1837 bp, Nicotiana tabacum
ccacgcgtccggcttcactatcttgagctggccatattttcatgcttgcaggaactgatttactgctttcgctgggtggcgtttttcaagtttaaagtttaggtcaaactcagaggattcgtcatagtttacatacttttctgctggtcattaacgaaactatgtgtactgaaacacgggggtgattcaattcttctttgtcacagatattaaagctggactaaagcatctacagactggactctatcctgtagttagatatgcagactaagaaaaaattaaatggaagaaatccccgagagctggctagtccaaaggtttcaagacagcagcggaagatgtccgagaatgtgcaaactcaggcaaagcaagttaaggaacttataacatctacagtgaggaagcaaaaatcaggaagcaatttcttgaaaaagattgagaattatgttgctgctacagatctggatgtaagatttggattggtgtctgatgacacttctgctgcttcagacgcacatgatgctgttcatgaatataatactattactattaataaggactataatgttgaaactgatagttgcacaaatgatactatattttctcctaccttccatatatccagaactattggaggggaaatttctaacagagcagacatacccaaattcattgagcaagcagaccagccattgcaggagcctggaaaggaaaatatggaagttgatctgctgacaagtcattttgtgctggacgaggctaccgatatagggggccagcatatctcctctgaagtttcagctgtgcatctctctattaaagattcaaaactggaatgcattgatgaatttaatcaatttcagttgcctgctgatgttagtatggaggaagaggaaactgaagagtttgatgactttgatccatattttttcataaagaatttaccagacttgtactcagttgttccaacatttcggcctgtgctattgcctaaacaaacacggagttgcccatcaaccactcttgttttggacttggatgagaccttggtgcactctacacttgaaccttgtgatgatgcagatttcactttctcggtgaatttcaacctgaaagatcataatgtatatgttcgatgccgtcctcatcttcgggattttatggatagagtatccagcctatttgagattatcatatttactgcaagccaaagcatttatgctgagaagcttctgaatgtgcttgatccaaagagaaaagtatttaggcatcgtgtttaccgtgagtcatgtgtatttgttgatggcaattaccttaaagatctgtcagttcttggccgtgatttagcacatgtgattatcatcgacaactctccgcaggcatttggattccaggtggacaatggtattccaattgagagctggtttgatgaccgctctgacaaagagttgctctctttgctcccatttctggaaagcttagttggagttgaagacgttcgaccgattattgctagcaaattcaaccttcgcgagagaatagctgctgctgctacttgtccttttaactctattagaggtgatgcatttgagagatagggatccgtgtctttatagattcagtcttggttacttgaattttagatttcaatggctctcgatgagttgcaggaatcagttctaatgtacctttgcggatgtgagtttgctagaggctgatctctaatgttggttaatttatgtaattcacatttatgtaatggtgccataacgacgcttgagattggaggaaacttctcaataaggctgtatctgaaacgtgaaatcatccaagcgag

SEQ ID NO: 94 - DNA, 2098 bp, Nicotiana tabacum
ccacgcgtccgcttagggttccaaattgctctaaattcccgcggattgagagttcattggagacttccattgttcccagcggctaagatgagccggttgattgagcatcacctagcaaataataaacaggacatgaaagggacagaggtttttgttggtggtttggcccgtactactactgaaagcaaaattcatgaggtattttcttcatgtggtgagattgtggaaatacggttgataaaagaccagacaggcgttcctaaggggttttgctttgtacgatttgcaacaaaatatgctgctgacaaagctctgaaggaaaaatctggatatgtgctggatgggaagaaactcggggttcgcccctcagttgagcaggacactttatttcttggaaatcttaacaaaggttggggtgcggaggaatttgagagtattgtgcgccaggtttttccagatgttgtatctgttgatcttgcacttcttggagatgtccaacctggtcagaagcaacggaatcggggttttgctttcgtgaaattcccatctcatgctgctgcggctcgtgcttttcgggtaggctcccaatctgattttctcattgatggcaagttacatccatctgtacagtgggctgaggaacctgatcccaatgaacttgctcagatcaaagcagccttcgttagaaatgtacctcctggtgctgatgaagattacttgaagaagctctttcagccctttggcaatgtagagaggatagctctatccaggaaaggtagctccaccattggattcgtttacttcgataagcgatctgatcttgacaatgctattatggcgttgaatgagaaaactgtacaagggccaatgggaggtccctcatgcaagcttcaggtcgaagttgctaggccaatggacaagaacaggaaacgaggtcgtgaggatccaaacatgtccagtaccattgagagtcattccaagcttttgaaggatgatccagatgttgagatgattagggctcctaaatcaactgctcaactggagatggattattcggatccttatgaagctgctgtagttgcattacctgtggttgtcaaggagcgtttagttcggatcttgcggcttggtattgctactagatatgatatagatgttgaaagtttaaccagtcttaagatattgccccagtcagctgccatatctattcttgaccagttcatgttgtctggagctgatatgcagaacaagggaggatatctagcttcattaatttctaagcaggttgaaaaactgggaccgaaacaattcgatagtaggtcaaggatagaagatgttggcttgagggtgccagaaccagacaggttctctacaagagttcgtttgccagatctagattcatatgcctcacgagtacccttgcccatgcctaggactgatgtttacacatctcactattcagcgtatttagatccccatctgtctggtcggatgacagcaaagaggatggaggaagcaagttcccatttgcaggcgacttcacttctgtctagtcgggtggcaacgaggatggaggaggcaggttccactttgcagtcgctcctatctggtggggtgacgacaagaaggatggaggaagcaagtccgattttgcaggcaacactccttccatctggtcgggtatcaaggatggatgaagcaagtcccaatttgcaggcaacatggagcccttctcctactaatgacagaattggacttcattcacacattaccgcaactgctgatcatcaacatactcgaccacggatcaggtttgatcccttcactggtgagccatacaaatttgaccccttcactggcgagccaattgttcccaagagctcaagtcatcatcgaagcctgtactgaacgttctgagcattctaatttacaaatggcttattgccaaacctatgtaacataatgatgcgtatttttgttcatccgcagctgtaaaatagtagctgttagcaggattatttggttatgtttctcattgacttcattgattgcgaaggtgcatttggaatctcggcaatcacaatttatagccggtgca

SEQ ID NO: 95 - DNA, 2311 bp, Nicotiana tabacum
ccacgcgtccgcccacgcgtccgcaaaccctcccgcgaagctaaatttcccctttttctctctctctttgattcgaataagagaaattgggggtttacagtaattggggttttcgtatatttagttctgtaaactcatccctcgactcgattcttcttttgatttgcattgattatcattagatttgactttgattttcaattcaattctaattgatggaggatactaatcagcagaacgtcgatcgattcacgtctgtttcatcttcaggtgaaagagccgttgagccacataatgctgcagaacagcctatttcgcccaaagatgaaaggactgtttctgcaaatgcttctgtgaatgcaatcatccctggggctttaagaaatgctaaagatcaccctgttacctctgaaactggagctctgtccgccttttatcctctcaattcctattctcctcaggaccaaggtttttactatggaggttacgacaacggcactgggagttgggccgaacaatccaatgatgtcaatgtgaacttgcatgtagttccgccagcaatgtacaatgagaatcccctctttttccctccgggttacggctttgatgctcagatggcatttggacagttctcccccatcgctagtcctctttctccttttatgatagatggccagctatactccccacaccagattccggtttctccaaattactatgcaccacctatttcccctggcttgccgcatgttacatcagctcttccagcttcgcagcctgatctggtggcaccaggaagcactggccatgaaattgatagcatgtattttgggccaggatcaggttactacatacccgttggatcgtttggcggaggcgagctttcgggaagcagcaacattggtttctacaattaccaaggtgaatttggatctggtcaatctttacctaatcgacctaaccccctggactctggaagatacatgtctcaaatgacatctgcggcactatatccacaaccagttggcatacttgggtcgtacgaactaaacgccatgcaggcttcacatcaaggtcttggattcacaccaggctcctcaggcaggaattattcccaaggcaatccttatcctagtgcaaactatggtactgggtctagttctctgtgggaaccaggtcacagaaattggctaactcctgacagaggtggaagacgtgagagggatcggcactctgttaacatttctactgaatcacttggtatggcaagtgaacgaaaccgaggaccaagggcattaaaaccaaagagcaagggtcccattgaggatagctcttcatctgtcatccgtaaagaagttgagtcgactaatactttgcagcctgagcagtataatcggcctgaatttgtcactggttatgaacatgccaagttctttgtcatcaaatccttcagtgaagataatgttcacaaaagcatcaaatatagtgtgtgggctagcactcctctgggaaatggaaagcttgatgctgcttatcgtgaagcaaaagagaggaatgctgattgtcctgtttttctctttttctcggtgaatgctagtggacaattttgtggggttgctgagatggttgggcctgttgattttgagaacaatgcggagcactggcagcaggatcgatggagtgggcaatttcctgttaaatggcatgtcattaaggacgtgcctaacagtcagttccgccacctacttctggaacataatgacaacaaaccagttactcacagtcgagattctcaagaggtgaaattgtcagagggactagaaatgttgaaaattttcaaaaactatgaagcggatacctctatattggatgatttcacctattacgatgagagggagaagtccttgctggaaaagaagagtaaacagcgaacacttcaacctggtagtgctgcagttactactgcagctgacacaataagtcaactagcggatagtcttgccggcacattaaacttggaaggcaacaagaaattgccttaaaaagagtttgtaatgcttaagcctgtagcagattccagaggcaatatcaactgctgtcattcaatgttagttggttgggcaaccagctggctcgtatagttaaggagattgctaacagcattttgggaggtggccttttcatcacctttggatcagaaaactctctttatctctttcctttatttgtcatttgttcaatgagttggttgtgatttgcaattcttgggcaaggagaggcagccagtaatgttatgagctatcgtttaccc

SEQ ID NO: 96 - DNA, 2562 bp, Nicotiana tabacum
ccacgcgtccggggttggcaagaaaaattctaaagagaaaaggaggaacacattgattttacgaggactagtcattcatttttcttggacagtcttggaaactaacagcttgattgctgaccctttctcctatcacggctagacagccaaactccacattcttatataaagaccacccttttcattttggatttggtaaaacaaaggaagtccagaagataatcagagaaagatgaaatttgggaaagaatttgcatcccaaattgtccaagaatggcaagaagcctatgtggattacaattatctcaagagtgttttaaaagacatcttgaatttcaatattgccgcttcacctgaagttgaaggctccttaaagagaaggctatctatgtacagagcctttagtggattacaaactagtttcaaagtttctcaaaacaatgaagatgaagccatattagtgagttcagaaggccactatcaaactatgtttcttatgtcatctgaaaaaggtggagaaaatgagatggttttctttaaaagacttgatgatgaattcaacaaggtgataactttttaccagaaaaaagtagaggaagtgaaggctgaggctgatgagttgagtaaacaaatggatgcacttattgctctaagaatcaaggttgataagccttctataagaatcaaaaattcccatttgggaaatccaggtaggtcagaaatggaggcaatacaagaagcagagatgacaagtgaagaagaagaagcaacaagagggaaaagagatacagcaaatacaaaacatatggaatttaggcctgctccactagagattttggaccatataaaaatcaatcttgaacccgaaacacctgtctcaactttaaaaaatatcatccatacttcaaaatccaacttatcattcagcaaagaggagctcagaaaagctgaagaacaaatgagaaaggcttttgttgagttctatcaaaagcttcgacttctgaaaaacttctgtctcttaaatgtgttggcattttccaagatcatgaagaagtatgacaagatcacctcaaggaaagcttctaaatcatacttagagatggttaataaatcttatcttggtagctctgatgaggttgctaagctcatagaaagagtggaggccacattcataaagcattttgtcaatggaaatcgaaggaaaggaatgaaatctttaagaccacaagctaaaagagaaacgcatagagtaacatttttcctgggtttgttctctggcggctcaatagcattagtggcagctattgctgtatccatacatttcggaaaccttctacagcatgagggtcgtgggcagtatatggaaaatatatttccactctacagcctattcggatacattgtcctccatatgctcatgtacgccgggaacatatactactggaggcattttagagtcaattatcccttcatttttggcttcaagcagggaacagaactaggttacagacaagttcttttccttgcttctggtctttcagtacttgcattggctgctgcattgtcccacctagatatggagatggatccaaatacaagaagttttgagacagtgattgagctgatcccacttgccgtggtgtttattctgcttctaataactttttgccctctgaacatcatatatcgttcaagtcgcttcttccttataagatgtggttggcactgtctatgtgctcccctttacaaggttaatctaccagatttttttcttggcagatcagcttactagccaggttcaggcaattaggagtttgcagttctatgtctgctactatgtgtggggcaacttcagaacaagatctaataaatgtcaagaaagcagtgtttatcaaatcttatacatagtcgtcgcaattattcccttttggtctcggtttattcagtgccttcgccgcttatttgaagagaaagattcaatgcaggggcttaatagcctcaaatatttctcaaccattgttgctcttgtgatgaggacactttatgctcaaaagagaggaacgttttggagagtaatggcggcatcatcctcaggaattactacagttgcaaatacttactgggacattgttatagattggggtttattgcaaaagaattcaagaaaccgttggttgagagacaaactgcttgtgccacacaagattgtctactttgttgccattgttcttgacattattctgagactagtatggatgcagttggttcttgattttcaagaactaccatttctgcacaagaaagcaatggttgcagtagttgcctctctagagatccttcgccgaggcatgtggaattttttcaggttggaaaatgagcacttgaataacgtcgggaaatatcgtgccttcaagtccgtaccattgccttttaactacgaggaggacaagagtctatatctatacctctagctgatacgcagaagtcgaaggaatccagggttttcttttctttctttttttttcttgcacaaattcttctgattcgttgccgtatattggt

SEQ ID NO: 97 - DNA, 1205 bp, Nicotiana tabacum
ccacgcgtccgaaaccataaacagagcagagagcgattgagagagagagagagaaatggagactgtaaaaaagagtgcatcggcaatggaagcattcgagaagcttgagaaggtaggggaaggtacttacggaaaggtgtacagagcgagagatagggttactggcaaaatcgtagcactgaagaagacgaggcttcacgaggacgaagaaggtgttcctcccactactctccgcgagatctctcttctgcggatgctctctagggatcctcacattgtcaaactgatggatgttaaacaaggccagaacaaagaaggaaagacggttctctacttggtctttgagtacatggatactgatgtcaagaaatttattcgtagtttccgcgcaaatggagaaaacattccccctaaaactgtcaagagcttgatgtaccaactatgcaaaggagttgctttctgccatggtcatggcgtgttacacagggatctgaaaccacacaatcttctgatggaccgtaagacgaatgtgctcaaattagcagattttggacttggcagagcttatactctgcccatcaagaagtacacgcatgagatattaaccctatggtatagagcccctgaggttcttcttggagctactcattactccacagcagttgacatgtggtctgttggttgtatctttgctgaactggtcacaaaacaagccctcttcccaggagactctgagctgcaacaactgcttcacattttcagattgctaggtactcctaatgaagaactctggcccggggtgagcaagctagtaaactggcatgaatacccccaatggaacccccagccactctcaactgctgtccctggtctagatgaagatgggctccaccttctaactgagatgttgcattatgagccagctaagaggatttcagcaaagaaagctatggaacatccctatttcgatgatttggacaaaactcctctctgaagtcccgctcatgacccatctgttgaaaaattgcaaatttctcatcaccggagatcaacaaacccatctaacccctcatcgcaagcttttattgcttttctcaagcatcttttaatagtatcaattagtatgactagcttcacctaaaaactttgtctttctatatcaattggatcagtgtagcacaattatgtggaatgatagaaccgca

SEQ ID NO: 98 - DNA, 1238 bp, Nicotiana tabacum
ccacgcgtccgatttcctcggctattttctgcactgactcacgatttttcggacgctttgttctcgccgtagcgcggatattatacactttgtacaatctctgtagtgatcgccgattgatttgccgctccggtgaagttgtccttgccgaaaattttctctcagatcttgtgaggcaggtggctgcagttgttgtaaaggttgaagtagctctagacaaaagcatttgcatgttgaccagatgagcagaactgatgttatttgcagtagaaggaggaggtttcttctcgtcttcagcttctggatatagtaagggcctgacccttctactcttgggtcagaagaacgaagagaagcccatgagagttgcaccgtggaaccagtaccagttggtggaccaagaaactgatccggacctccagctggcttccgggaagaacagggttgtccgcgggtgcgcctcctttgtatgctttggtcgcgctgccgctggacttgagagcccatctccccttaaagtcggtcctacccaacagccagaagtcttgcctagctgtcctgcttctgacaaggacaacaatcagtcgcagtgtgttaatattattgaagacagtcatatctcaccaaaggttgctcttcggagtagcttaaagaaaccagcaaatagtatacccatttctggtggtaatggtaatgaacgcggcacaaattctctaaagattgatgatgcccccaatcctatggagaaaaggaaagtgcagtggacagacacatctggaggagagctttttgagataagggaatttgagcctagtgatgatggtgaatcagatgatgaatttgagagtgggaatgaaagaacttgttcttgcaagataatgtaattttagctccttatagaaggtttcatggctgattttcatgtaggaggcaacaattgaggtgctgcagatgatattacgtgggaggttggtttcgacacatgccttttgctcaactatcagtcgacacaagtgaattttgaggctttattaggtagcgtcacgttgatcatgggcttttctggttttggctgactaatctgttgtctatattcaaattcttgaatgtcagttttgtttctctggggcccgctcgtctattgttttcataattatattttatcttcatttttttaattaaaagatttctggtcctcttttatccaaaaaaaaaaaaaaggacgaccgctgtagggt

SEQ ID NO: 99 - DNA, 2036 bp, Nicotiana tabacum
ccacgcgtccgagcatatattcttcttcttcttccttttggcttctatttcattagcttataaaaaccaaaacacaaacccacaaacaaagaaacgttaattagctttgtggagtggagagaccttttattgaaagggagcttaactgttggaccagctgagcactacttgccaaagatttgaactttcttggttttttggactggaagttagataaagctcaaatcttttgggtttattttgtatctggtacagtttcttgaacaagaatagcaggaccttcaaggctgaaaagggaatattttcggcttttttggagtgatttgttggatgatcaggaaattgttttgtatttgagggaagcagttaataaggtagaatagaaatgatggatagggtgccaagattgcttatggaggttctaacagaaccgcaacgaggaggagagtctttactcgggtcgattaagattgctgttttaccgattgcaaaagtttttaccatgtgcttcttgggatttcttatggcctccaagtatgttaatattcttccagctaatggacggaagctcttaaatgggttggtgttttcacttttactgccctgcttgatattctctcaacttggacaagccatcacatatgagaaactgcttcagtggtggttcatccctgttaatattgttatcgccaccatatctggctctattataggttgcatcgttgcttcaatcgtccgtccaccatacccttatttcaagtttaccgttgtacaaataggcattgggaatattggaaatgttccacttgttctgatagctgcactatgtcgggataaatcaaatccttttggagactacgagatatgttcgcgagatggaaatgcatacatctcatttggccagtgggttggtgcaatcgttctctacacctatgtgttcaatatgctcaaacctcctagtgaaggcactttcgacgttcaagatgcaaatcttcctatcaaaagtcctaacaaagatggctcgcagagccatctggtagctagttcaccagagcaagttccattacttacaacagacgtagcaccggctgactcaagtggttcaaagaaagaaaaggttaaagagttctttaattttctatatgagaaactgaagctcaagcaaattattcaaccccctattatagcttctgtcctagccattgtcataggatgtgtgccaatcctgagacgacaggtctttacttctgatgctccactttacttcttcactgacagctgtttgattcttggggatgccatgattccctgcatattgctggctttaggaggcaatcttgtcgatggaccaggacccggaagttcaaaacttggcctaaggacaaccgctgcaattgtctttggacggctggttttggttcctccaaccggacttggcattgtcatgttagctgataagcttggattccttcccgctggtgataaaatgttcagattcgtactcctccttcagcatacgatgcccacatccgtactttctggtgctgttgccaacttgagaggatgtgggaaggaggcagcggcggtattgttttgggttcatatttttgctattttctctatggctggatggatcatcctctacctcaacatactcttttaagttaggatcaaacagtgttgctacaaagagtaaaaagaagagatcttgggatggaaggtttttattcctgttaccaggatcgcgccagcctttcgtaaagctgctgtttttagctcattcaattgcctcattgccatttgagactaagagagagatgtattaatattatgtaggaatattacctactacatctataagtataattagtcatgatggagttaaccaattgctccttatttgttcttggcttcttctactgtataaccttagcttatgctaccttgaaactggctatgtcaaagttggacttggcatttggcagacaaagatgagacatgatgttcattggaagaataagtaaacgttgaacagc

SEQ ID NO: 100 - DNA, 1538 bp, Nicotiana tabacum
ccacgcgtccgagcttaagaaaagaacacttgccctgctgagtatctataaccatatagataccagtaccataattttgcatcatcttcaactctaagggatcaaagctttattgtccaaagaaaaaacttatggactcccctcataagccaaggtctttttcacctaacctattctttttcttccttcttgtatcctcaaatctcctgacttttttcatttctaacatatttaagaactcttcttgttctctataccagcaaacatataaagccattgccactgcttcattaaacaatgctatcccttttgttgttaagtcagaaactagagatgttgttcatgtatctgataaaccagcagctgatttagacttaccatctgagttccttgctttcacatctccacatcaactgccatttggagtcaactcgagctttaattctgacaaactcatccctcccgttggccgtccatgtactatgtttccagatttacttcggcgttacatgtcatacaaaatcaatggatcttgtcctgatgatgagctcctggcacagaagctgcttctcaaaggttgtgagcctctccctcgccgtagatgccgtcctgcagctcaacaggaatatgttgagccttatcctcttcctgagagcttgtggattactccatcagattcatctgtagtttggacagcatatacatgcaaaagctatgaatgtctaatcaacaggaaaaaaaatcaaaaagcatttgatgattgcaaagactgctttgatctcaatggcagagagaaaaatcgttggttgtccaaaaagggagctggccttgacttctctattgatgaagtactagcagtgaagaagccgggtacaatcagaatagggcttgacattggtggaggcgtagctacatttgctgtaagaatgagagaaaggaacataacaatattaacaacttcaatgaatctcaatggtcctttcaatacatttatagcatcaagaggagtcgtacctttgtacataagcatttcgcaacgacttcctttctttgacaatacactggatatagttcactcaatgcatgtgctgagtaattggatacccacaactctgctccacttcttattattcgacatctatagggtgcttcggcctggtgggctgttctggcttgaccattttttctgtgttggtgagcaatttgagcaagtctatgctcctcttattgacagcattgggtttaataaggtcaagtgggtcgttgggcgaaagatggacagaggccccgagctgaatgagatgtatctttcagcactgttggagaagccactgaagaactcttggtgatagtattagatgtttcttttactttcttacttttgatagttatagaagagaagatagaaggaggtgtttattttttttaaaattatagattcatttcagatgacatcttctggcataaactagcagtttgaggtagcttgagtatgattttgtaatgttggtgggctaaaccttagagctttagcggcc

SEQ ID NO: 101 - DNA, 1210 bp, Nicotiana tabacum
ccacgcgtccgtgatgctgttcatgtatctgataaaccagcagctgatttagacttaccatctgagttccttgctttcacatctccacaacaactgccatttggagtcaacccgaactttaattctgacaaactcatccctcctgttggccgtccatgtactatgtttccagatttacttcgtcgttacatgtcgtacaaaatcaatggttcttgcccggatgatgagctcctggcacagaagctgcttctcaaaggttgtgagcctctccctcgccgcagatgccgtcctgctgctcaacaggagtatgttgagccttatcctcttcctgagagcttgtgggctactccgtcagattcatctgtagtttggacagcatatacatgcaaaagctgtgaatgtctaatcaacaggaaaaaaaatcagaaagcatttgatgattgcaaagactgctttgatctcaatgggagagagaaaactcgttggtcgtcgaaaaagggagctggccttgacttctctattgatgaagtactagcagtgaagaaggctggtacaatcagaatagggcttgacattggtggaggtgtggctacatttgctgtaagaatgagagaaagaaacataacaatattaacaacttcaatgaatcttaatggtcctttcaatacatttatagcatcaagaggagtcgtacctttgtacataagcatttcgcaacgacttcctttctttgacaacacactggatatagttcactcaatgcatgtcttgagtaattggataccaacaacactactgcacttcttattattcgacatctatagggtgcttcgacctggtggactgttctggcttgaccatttcttctgtgttggtgagcaatttgagcaagtctatgctccccttattgacagcattgggtttaataaggttaagtgggtcattgggcgaaagatggacagaggccccgagctgaatgaaatgtatctttcagcactgttggagaagccactgaagaactcttggtgatagtattagatgtttcttttactttcttacttttgatagttacagaagagaagacaggaggtgtttttattttttattttttatttttttttaaattatagattcatttcagatggctcttcaggcataaactaacagtttgaggtagcgtgagtatgatcttgtaatgttggtgcggcta

SEQ ID NO: 102 - DNA, 2088 bp, Nicotiana tabacum
ccacgcgtccgcaaaatccacaacaatctcaaattggattttctaatctgtaatattaattacttcattcaaattatgtaaattcttttgtataaaaacccttaaaaacacaatcttttcatcaattctcaattgggtttctcttcttaatctgtaagtttttgttacttcattcaattttgtataatggattctgatttttctcccgggtgtgggtcgggtatacaatcagactttgcgttcgctttcaatgatagcaatttctcggatcggatcttaaggattgaaattgtacccgacttgccggattgtaaaacgggctgtgaaggttgtactggcggcattgatgattgggcccggaaccgcaagcgtaggagagaagacatcaagaaagaaaatgatgcggacgtggtcatgcaacgtgaggagcaagtagtaaattgtaatgtgcttgaaatggaagatggtcttgctgatgatgaacaagatgaagaagctgtaggaatgcttgaggaatcaccctctggcattgagatgaccacaaatccccctggcgatgatgaagcttctaaaagcgatgatgattcatctacaaacatggactcttcaaccccccttcgggtgagaactatacatatcagttctcccattttggcagctaagagtccattcttttataagttgttctcaaatggcatgaaagagtcggaacaacggcatgtaaccatacgaatcaatgcgtcggaagaagctgccctcatggacctcttgaattttatgtatagcaatactttatcaactacaacactcactgccgtgcttgatgtgttgatggctgctgacaaatttgaggttgcgtcatgcatgagatactgcagccacgtactgcggaatcttcgcatgacttgtgaatcagcattgctttatttggatcttccttccagtgtactaatggctgatgcagttctgccgttaacagatgctgcaaaacagtttcttgctgcacgtttcaaggatataaccaagttccaagaagaggtattgaatttgcctcttgcgggaattgaggctgttctgtccagtgacgatcttcagattgcttcagaggatgctgtctatgactttgcgttaaagtgggctcgcatccattacccaaagcttgaggaacggcgggaagtattgagctcacgtctttgtcgactcattcgatttccatgcatgacatgcaggaagctgaagaaagtcctaacatgcaatgattttgatcctgagcttgctacaaagcttgtcctcgaggctcttttttataaggccgaagcaccatatcggcaacgctccattgctgcggatgcagggaatgctttgtgccatcgttacatggagagggcatacaaatacagacctgttaaagttctcgagttcgaagcacctcgtcaacagtgtgttatttacctagatttgaaaaaagaagagtgtgctagcctctttcctgctggtagagtttattcacaggctttccatttgggtggacagggatttttcctgtcagctcattgcaacatggatcaacaaagtgcattccattgctttgggctgtttctgggcatgcaagagaagggggcagtgtcatttgcagtcgactacgagtttgcagttcgtaccaagccaaacgagcaatacatgagcaaatacaaagggaactacactttcactggtggcaaggttgttggctacaggaacctgttgggtgtaggttggagcgcgtttttggctgacgatagtgcttacttcatcaatggacttctccatcttcgagctgagcttactatcagccaatagagagtttaaatactatcgctgtgcttctgctgacagctaaactatactttttacttcagtgaggccttaagaagtttacattgtagtggcatcttacttgaaagtgcagcacatgtgagcaatagttgtatgggctatatattgcttgttacctattggcatatatgcactggtgtaaattagtaaaatcagtctttgagcggttcatattttgacaatcacagtctttgttaagagttctagctgccc

SEQ ID NO: 103 - DNA, 1368 bp, Nicotiana tabacum
ccacgcgtccgcccacgcgtccgcgctgagcgtttcaacgacttagcttctgttgattctgatcaactgctttcgatcccgtggattcgtaaactcttggatgttttcctctgttgccaggaacaattcaggtccattgtgtttaacaacactgcttacttgaataaagctcaatggaccgttacattactgattatttcgataggagtgtgaagggtttggatgtttgtaacgcgataagggacggaattgagcagatcaggcaatggcagaagcagatggagattgttttgtgtgcattggagaatcagaggagtgttggtgaaggccaatttcgtcgcgctaagaaggcgttgattgatttgactattggtatgctagacgataaggattctaatgcaactgttaaccatagaaacaggtcattcgggcgaaacaatactcagaatgatcataggtctatggggcattttagatcgttatcgtggagtgtatcgaggaattggtctgctgctaagcagctccaagcaattggtaataatttagttgctccgaaaagtaatgaaattattgctactaatggattagctttggctgtttttacaatgagttatgtgttgtactttgtaatgtgggcactagtggctgcaattccttgccaagaccgcggcctgcaaacacatttttatgtgactaggcaattcgtttgggccggcccaattttgtgtcttcatgaaaggattttggaggaatcgaagaagagggatcgtagaaatgcttgtggattgttgaaggagattcaggagattgagaaatgcgtgcaccaaatgaacgaattgatcgatactgttcagttcccaatcacagaggaaaaagatggagaagtaaaggaaagaattcatgaacttgggcttgtctatgatggtttaaagagtggattggatcctttggagcgccaggttagagaagtgtttcataggatcgttcggagcaggactgaaggccttgactctattggaagatgaaatcatgagtgacaaatttgtgtagaattgggtgatggttgtcttttgagaaggcatctattattagaacatgagcataatatgatatagattttccccttttttttcttttctttgtttgaccctttttttagatgagaagaggagggagaatggttaatggtgtaatgtgcctaaagaataagtagtttaaagaggtgaaaatcatgtattttcactttatatatgtaaagaaattaggaaaaaaggtggatctttggtccatttttggtgatgttcatcttgtttggaattgtataatcacatttctgagttaagttgctttttaaaaaaaaaaaaaaag

SEQ ID NO: 104 - DNA, 669 bp, Nicotiana tabacum
ccacgcgtccggttttcttctcatcccaaatcgcactctagggttacgccgcctctatcaggaaatcatgcctcgccgaagctctggaagatctgctcctcgtcctgcccctcgtgcggcccctcgtcctgctccagctccagtacaccatgctcctccaccagctcctatgcaaagtagcggtggtggatccatgcttggtggtattggttctaccatagctcaagggatggcctttggtactggaagtgctgtggcacacagggctgtagatgcggtcatgggtccacgcaccattcaacacgaaactgttgcttccgaggtacctgctgcagcagcagctcctacaaccatcggtgctgggtctgatgcttgcagtatgcactctaaagcgttccaagactgcatcaatagctctggaagcgacattggcaagtgtcaattctacatggatatgttgtccgagtgcaggaggaactcaatgctgaatgcttaagcttgttgtgtctcattttaataactttgaactcattcttaatctgattgttgaaacagcgatggaattatgacaaaaggcttggtggtattgatggagcaagtgaatttggttcttgatacacttttgggtcaaataatttatgctgaaatatgaactttatagacttctta

SEQ ID NO: 105 - DNA, 1261 bp, Nicotiana tabacum
ccacgcgtccgcccacgcgtccgcccacgcgtccggccttggctctcactttcaaattcccgacctctttctagcgccgaaattaccagcacgcagagcaaggacaccattagccgttcggccactgacccaaatggaaatcggcggattagactccgatggccgtgaatttagaaacgcggacgagatgtggagagaagaagtaggagatggtgaccaccaaaagaagtctcaatggtataacaaaggcatcaattactgggaaggtgtggaagccacagtggatggtgtgctgggcggatatgggcatgtgaatgaggctgatataaaggcaagtgaggaatttctcaacaccattttgccagaaaggttccctgatgctggaagaggccgccatcttgtagctctggattgtggatctggcattggaagggttaccaagaatcttcttatacgatatttcaatgaggtcgacctactagagcctgtatcacattttttggaatcagcccgggtaaatttggctcctgaaaatttaatggtgtcagagttgcacaaagctgccaatttttattgtgttccactccaggaatttactcctgatgctgaaagatatgatgttatttgggttcagtggtgtattgggcatcttgcagatgatgactttatttcattcttcaagagagcacaggctggcttgaaacctggtggactttttgttctaaaagagaacattgcaaaaacaggatttgtattggacaaagaagataagagcatcacaagatcagattcatattttaaggagctgttcaatcaatgtggactatacatctacaagatgaaggatcaaaaaggatttccagatgaattatttgctgtgaagatgtatgcattgactactgagatgccaaggcaaggtaataaacctagacctaaacggacaactaatagacctgctatcatcagatgatgaatatcacattggtgttgtgtggttttactaactttggatgaagtaattcataggttattgtttttaggtcacatgtatgcgagttctgtcaatgttatgttattgcttttggatataagttatatacattgatagtgaagagatttgttgtgtactttagcttattgtaggttacttcttatgttgaattatttatgcaaccgcttttgtatcaatgtattctgctcttcttgtaaaaaaaaaaaaaaaaaaaaaaaaaaaaaaaaaaaaaccaatttaaaggtctgg

SEQ ID NO: 106 - DNA, 761 bp, Nicotiana tabacum
tttgtacaaaaaagcaggctggtaccggtccggaattcccgggatatcgtcgacccacgcgtccgcccacgcgtccgcaaggcttagggatgacgttgcccgataggaatgctaagaaaaaggggaagcaaaaggcttccggtgagtcaaaagactcgcacgtagctgaagctcttgataagcttagggaacagactagagaggctgttaaaggattggaatcagtggccgggccgagacctggtgtagatagcttggggaatgatgcaatgatggaggagtgggttaagcagtttgaggagctttctggatctcaggacatggagtcgatagtagagaccatgatgcaacagcttttgtcaaaggaaatccttcatgaacccatgaaagaaattgaagaaagatatcctaaatggttggaggacaacaaagctaagttgagcacggaagattatgaacgttacagacgccagtatgaacttataagagatctgaacaaagtttacgagactgaacctagcaacttcaacaaaattgtagagcttatgcagaaaatgcaagaatgtggccaaccgccaaatgatattgttcatgagcttgctccagactttgatatatcatctcttggacaactatccccagagatgttggagggccaacagaactgccgtgttatgtgaaaactgaaatgtccccccgcttgaatgtcctgcttgttttcgtcacctttgtcacagtttgcatacaacatttattttgct

SEQ ID NO: 107 - DNA, 1457 bp, Nicotiana tabacum
ccacgcgtccgctatacctagatgacatttaccttagcccttaagccaaaaaagaaagaaaagatccattgcctcatcctctgtaatctcatggattcactggtttcaatcctctgcatcttcttcttcttcaatataattcttaccccagttcatgctcaagtgatctttgaggatggttactcagttaagacactgattgatggccacaagatcaaaattaaccctcactccataatttctgtaatgggtgctggcaatttcatcattcttgattctgctgccagtactttttacaccttatctttcaacaaaaactctgaattttctatttcgaagttaactggtagtgagactgctggctatgtggatggttctctggataaggctaagttcaacaaacccaaaagctttgctgttgattcaaaagggaatatttatgttgctgatatttggaacaagcatgcaattagaaagattagcaagtcaggtgttactacaatagcagggggttattcactaaagccaggccgtgctgatggacctggattaaatgcgtcattctcagctgattttgaactttcttttgttcctgagagatgcactttaatgatctctgaccgtggcactatgttagtgcggcaaatacagcttaaggccgaggattgttcaagagattctcattctgctctaagagcagtttctacatggttcttaaccgtggggcttccctgcttggtctgcttgattctcgggttggtcatccgtccttatgttatccctaatgaacatggcagtcgtcttcggcgcaacatgacatggaagcacttcctaatcagtctggagagacaagttctgatgttctgcttcggcatcagaagcgtagttgttgactcaaagatctattcacttttaaggaagctcgtgttacttactttctcccatctgtgcctaatgtttagtcctaaagtagtagtatgccagacttctcgtaaacaactggctcctctcttaagttttgacgactctgaaagcaaagaatcagcaaaatcaccggtggcagctaacattttggaggatttgataacttttgatggaagtttggttaactccgagctgactactaatcaagatgatgcagtgagcaaaagtaccgatgtttctgttgtagatagcatgatactagctaatctaaaagggtttgcagaacaggggattgcttcttcagggcgtgaagtttcatcgagcatttcgagcttagttaaccgaaaaaagaacgtaacttagtgaagtctagcagtagtatgtattactattaacttttgcaactgttctgaaagttcatcggtctatctgctaccactttcatgtacatagtggaacaagcaaatgactcaaggcccttttgagttaatatttcctagcctgtgttttcttggttccaaaaaaaaaaaaaa

SEQ ID NO: 108 - DNA, 1374 bp, Nicotiana tabacum
ccacgcgtccgcccacgcgtccgcccacgcgtccggaaaagaatcgcagtttcgaagctatcagaaaatcccaaacaacaaccatgtcttactacccaaaaggctaccacggggaagatgacgacggagctgaattcgacgagtacgatccaactccgtacggcggtggatacgacatcgctttgacttacggtcgtccgcttccaccctctgatgaaacctgttatcagacttcttcagcttctgatgaattcgactatgatcgtcctcagtactcttcttatgctgagccttctgcttatggtgaggaggctcttgagactgagtaccaaagctattctaggcccaaacctcggcccactccttcttatcatcgcccatctgaggaagaaggcgaagcttatgagcagcctcaggccgattatgggtttcagcctgggatgaatcgtcctggcagtggatatggtggggaaagtgaatacggatccgggtatggacgcaagagcgagtatgaagaacccgcttccgaatacggatccgggtatgggagaaagaccgagtatgaagaacccaaaccggaatatgtagaacccgcttccgaatacggatctgggtatgggcgaaagagtgagtatgaagagcccaaaccagaatatggatccgggtatgggcgaaagagcgaatatgaagagcccacatcagaatacggatctggatatgggagaaagagtgagtatgaagaacccgctccagagtacggttcgggatacaggaggaagagtgaatatgaggagccaagatcggaatacgggtcgggttatgagcgtaggaccgagtccgaagagtatggatctggtggatatggaaggaagcccagctacgggcaggaggaagagggggagaggaggcccagttatgggcgttcaagctaccagactgaggagggagaagggtacgagaggcctcgctatggaaggtctgaggaggaggactacaggaagcctagctatgagaggcgtggtgatgacgacgacgagggctatggtcgcaagaaatatggtgatgacaactccgatgatgacgaggagaagaaacatcaccacaagcaccaccaccgcaaacactatgatgattgagcagtgtgctttaatcatctgaaccagatttatgccatactaagaactattacaaaataaaagttggcaagtttgagatacattttgtttgtgaatgtttgctatgatggctggactgtccagttatttatgtgatgtattttgctcttctgcaaatcccagacatttgtcagggttagtatgccatgaatgtgtgaactttatgatcatgatgactcttttatctcttaaaaaaaaa

SEQ ID NO: 109 - DNA, 2528 bp, Nicotiana tabacum
ccacgcgtccgcccacgcgtccgcccacgcgtccgcccgagccagacgttaaacgacgtcactttaatgtaccctttccccaaaaattggggctttgtaaattcatttgaacaattcacaaattgtagaatttagggttctttttcagtaatggaaagtgggatttgtagtcccacaagatgaaaagcagtcaagaagaagcgagccgcggcggcgcagcagatgaagaaagtgtgaaatttcacagtgttgtacagccacttagggatttagaatccaactggggtgttgatttagccaaaaatcttgaagaatatttgctcaaaatttgctctggtgaaattactagagataattatgatgatggtcatgtgaattttgctgaagctgcattgctgcttcaggggtcagttcaggtgtacagcaggaaggtggaatatctgtattctctggtattgcattgtttggaattcattaccaagaagagtgaaccagatctaccagcaagtgtatcagcccaagaagatgaaaacggtttgcctgctgccgacaatgaagagaatgatccatactgggcttcagaagaaacctcagtggaagcaaagaacatgttggataatacgacgtgcagggattcttcatttacccagtttgtgaaggcccctgcaaatctggttgtacgcgaggctgactgcttggatgttactggagatgctggagaactagagtcttacctgctagccacgtgtgatctttaccgagattttattctgttggacgcatgtgatgccgtaacagtggatgagtttctgaataatgagaatatagctggaaaggtgctgaacaatagctgcagtgcagagggcctttctttggactccaagtgccacaagagcttttactctcccacaagacgttttgagggaactggcaataagtcttcagctcaaaagaatcaggatgctaatttatatcagtctcaagggtttcatgagtttggtccaggcaattttaacaatgatcagttcgcatctgatatgcctgattacatcgatgatgcacatagatgtgaagatggatattcagaacctagagactcagacgaatcggatgatgaagacccatggaatccgttgaacccgcatgaacctggcactttgaaagtaaaaccatacaaaaaagttaaatttaatagaaggcagggtgcggcgtccaaaaaagttgcatctttggctacagaatttccagttgcgagattacatggtaccactagcgcagacctcaacgacatgtgggagagaaaatgttgtgccatgaaaaaacaaggcgactcacaatctcctccaccatatgagaagctccgggaatcacttcttcatggggagaacaacgattatgatggtttggatagtccaaaggaaaagaatgaaaatgatgactatgatagtgcagatcacgattttgggccttctgcctttgacatgccagaaaatgctgacatgaacaccgatgcaactccttatggggaaaagcacgataaatgtagtccattttttgacagtgaagctcatgaagattcgaatgctcatgccaaccttgaagatctttgtcgctcccacttggattctcttcttgctagccttgctgaaactgaaaagcagagtgaattggctgcacgggtttcaacgtggaaacagagaattgagcagaacttggaggaacaagaatcacatcccccctttgacattcatgaatatggggctagggttttgtgcaagttatccctggaagaaaatggtcaaagcaccaagtctttttctgatgttgtcacgggtcaagagaagcatgatattgctcgaacattttctgcgcttctgcaattggtaaacaacggagatgttggtttggaaagaggtggaatacgtgagtccacttgttacacagctgcaaatcccttctatgtccggctccttaggaatgataatggtagggagaaaatgcagattcggtcatcaagaaagagagcaaaatctccaatacccaatcagggctttagaaaggaaaaaaacaaaggtaaagaagttcaggctgctttcagttcatcaccttcagaacccaactcaaggttaccgatttgccctgaagctgggaaaggttaatggaactcgttgtacgcctgaaggtaagaaaagaaggaaatccagattagtcgtaccaccagatatacatactgcattgtgatatacattttgctctagttttcaagtaagcctctcctctctcgctattcggtctcactgtgcccgttgtatgtgagagactcaaggcagtaattctgtttgagtgtagtaagacagaagattaaccccaccatgaccactgtaattcttatcacaaaccaacaacctgttggctgcagaaatttgtaagatgtgtttattcttaacttaattaggacttactaatagtttggagcagggaggatgtaacaatattttgacatagtgcagagctactcatcatagctc

SEQ ID NO: 110 - DNA, 1336 bp, Nicotiana tabacum
ccacgcgtccgcccacgcgtccgccaaaatccatcacgaattgcattttcagatacgtgagtcaactgctaatgggagaacacttggctctatgtgttgatcgtcttatcacacctaaatctttgcactcgttgcaagggtcagaggatgcaggatcctctgcaggaagttcttgctcgcacacagtaggtcaatcaccttatggtactactaataaggaggatgaagaactagaagctggaggtgaagatgagccattacttcagactgtggaatgccgaatttgccaggaagaagatagcactaagaatttggagattccttgtggctgcagtggcagcttaaagtatgctcataggaaatgtgttcagcgttggtgcaatgagaagggtgatataatttgcgagatttgtcatcagtcttatcaacctggctatactgctccaccaccgccttctccttctgaagatattgccatcgacatcagtgggggctggacagtggctggtactcagcttgacttgcatgatccgcggcttcttgcgatggcagctgcagagcgccatctcttggaggctgactatgacgagtatgctgattcaagtgctagtggagctgcattttgtcgttctgctgctttaattttaatggcccttctattattgaggcatgctgtgaccatcggaaatgatgatggagatgacggtgatgtctccacctttttctctcttttcttgctccgtgctgctggttttcttctaccttgctacatcatggcttgggctatcagtatcatgcagcgtcgaaggcaaagacaggaggcaacagcacttgcggcaacagaagttgctttcatgctgcaggcagggcaacataggggcttgcatgtaacaatagcaccaggacctgcacagttagctgaaccttcagcaacaccagcacacccaactactcatgttgcaacaccaaccgcccaggcgacatcccctcctccagagatggtataaatggctttgctcagtttgcttgttataaaatagttgccgataggggcattttactgttggtaagttgcacaagatggggatgagtagaagggtagaggagtattcttttccctttttgctttttcgatttattagctgtatctttgcattgccaaatttggagtgcagaggctgaaactttttccatttgttcaatttttcattaatgcttgaacatgtaaaaatataatagcgaacttagctgctttcaatgtggagataccatatcttcacatcgtgtacattgtttatatattaccattatgggttactcttaaaaaaaaaaaaaa

SEQ ID NO: 111 - DNA, 1122 bp, Nicotiana tabacum
ccacgcgtccgatgagacttggagggtgtcctctggtttagctgaggcatggcgagacaacacaaatgttgcatccaagaaaaagtcattttccattgaaactgaaattgatgatgaggcgactagttatgcgtctttgaacgaggacggtcatgactttgatgagattgaggatatgaggatacgcgggaacttgttttacaagcttgataaagattccaaggaatacgaagaatataagtttgaattccatagaaggaatacgaacaagaataatggaaatgacggtccaaaagagaaggaaaaatcgaataacgtttcagcttctagggtcgagaaaggtctaaagggtatagatgagaagcagcaaaacaagaaagagaaactgagctataactctgcctctccgtttcagaattttcagctaaatgatttcggagcatctccaataaagaggttaagggttccaacttttaatcagcttactgccccttatcatgagccgttttgtttggatatttatgtgtcgaaaggttcagtaagtgctagcattatccacagagctactagcaaggttgttgttgtggcgcactctatttcaaaggacatgaaatttgacttgggatcaactaagaatagagctacttgtgctgctattggggaagttctggctcaaagagcactggctgatgatattcataacgtagtttatacgccaaggaaaggggagaaattggaagggaaacttgagattgtacttcagtccattattaacaatggcatcaatgtgaaggtgaagattaagcagaggaaaaccaagaaacctggcttccaccgcccgacagcttaggtggtcatcctacattacgtaggatgaaattaaaagtgacaaggaagttttatcaacgtcttataagctcgaaacagcgcaatgtagtaagtagaacaaggtcagagatgtattactacctcttttgcgaggttgcagaacatttccctaaattcagtctttaaatcggtttcaatagtagttacaaacttgggaataaatcttttatttcctgcaatttgtattctctttatgagaatacattgctgttaatgtaaaagtgtgactcgcag

SEQ ID NO: 112 - DNA, 1098 bp, Nicotiana tabacum
ccacgcgtccgcccacgcgtccggctggaactttgctgtatcatcttcaaactcttgattagttatattaaagactagtctttaaactcaatgggtgatagtcagtactctttctcactcaccactttcagcccatctggaaagctggttcagattgaacatgcattgactgctgttggatctggtcaaacttcattagggattaaagctgctaatggtgttgtaattgctactgagaagaagttaccatccatcttagttgatgaagcatctgtgcagaaaatacaggttttgacgcctaatattggagttgtctacagtgggatgggccctgattctcgagttttggttcggaaaagtagaaagcaggctgagcaatatcaccgactctataaagaaccaatccctgtcacacagctggtgagggaaactgctgctgtcatgcaggaattcacccaatcaggtggtgtaaggccatttggtgtttcactcttggttgcgggatttgatgacaagggtccccaactatatcaggtggatccatctggttcatacttctcttggaaggcttcagctatggggaagaatgtctctaatgcgaagacatttctcgagaagaggtacacggaggatatagagctcgatgatgctgtacacactgctatactgactctaaaggagggattcgagggacagatctctggcaaaaacattgagattggcattattggaactgacaaagtatttaaagttctcacgccagcggaaatagatgattacctacaagaagtggaatagattttcttttccgcttaaggcattggaaaaagttgtcaggttggaagcgcagacggggtcatagcacaactattggatgttcttgttggcttgattatcacttgactttaatcaaactagacttagttgtatgttggccatgttgtggttatttattgcctgatgtatggctctgaaaagttatatgggttttcttttctcagtttcttgaacatactgattgttctatgttacctgaaacacatgacagtagagaaaagcattatattatttgagcaaccctcttacgtctgagaacgg

SEQ ID NO: 113 - DNA, 1105 bp, Nicotiana tabacum
cgtccgaaatggcggaagacaagaaagagtcaacgtcgagttcgccgctccaagaagatcccgaagatcccgtcaaatcccctccttcttcccccaattcctccactcgcaaggcttgctatgctgttcttcaaagttgggtgtcaaagaagttcatgactggatgcgtggtcctcttccccgtggctgttacatttttcatcacttggtggtttattcaatttgttgatggtttcttcagccccatatatgaaagacttggtattgacatatttggccttggatttgtgacatcgataaccttcatattctttgtcggtatttttgcttcatcatggctgggttcaacagttttttggataggggaatggtttataaagagaatgccctttgttaagcatatatactctgcatccaagcaaattagttctgctatttcaccagaccagaatactaatgcattcaaggaagttgctataattcgtcatccccgaattggtgaatatgcgattggtttcataacatcttcagttgttctccagagagatgatggggatgaagagttgtgcagcatttttgtccctacaaatcatttgtatataggagatgtatttctggttaattcaaatgatatcatcaggccaaatttgtctgtgcgagaaggcatagagatcattgtttctgtgggaatgtcaatgccgcaggtgatttctcctatagaaaggatcacacgacagaccgaccggatccctctaaacagaatgttaaagtaaacagaatcatcatctcatttgcttctggtttgcgctaagctaccataatctcatttttttagggaagtcgcatatgtatactgttggtcttctatgttcatttgatggttcagcagatctgaactggagcaattagcaacattggtgactttgttgtgtgtttattctttaggattagtaggaggagttctgtttgtcggaaacaaataggtagggaggcattgtttggctgtagctggtttactctaattaacatttcaccgtggtctgtacagtcttgtaacttatgagttcttgtgtttgtattataaagaggctatcagtgttatcgc

SEQ ID NO: 114 - DNA, 2310 bp, Nicotiana tabacum
ccacgcgtccgcccacgcgtccgcccacgcgtccgcccacgcgtccggcagcctacagtccatattcacgtgctacatcccctgccccaactttggggcatgatggccagctctatggatcacaacaataccactatccgtatttccagcccctccctccaaccagtaattcgtacactactccagttgccctgccaaaaggtgagattgccacctctgctgctgctgctgaccatgcatcgttgtctgttgattctgctaatggaatttctaatggcattgccaatggtggtgtaaagggaaatgctgggcctacgcttgtgaggcctgcattccagaacccatccgtaaatgctaatggttcttatggacggggtgcgttgcctggaggagctgcttcaggttatcacgaccctagattaggttttgatggtgtgcgatctcccattccatggatagatggatcaatgttcactgacgggcaaggtaggctagtgtcgagcaattcttttacaccatctttttcaaatggcagtgccgttccatcatcaaaaaatcagaatgttcatccgcatctaatgggcttccaccacccaaggccctcttctggcatgaacacaacaaatgggtatatgaataggatgtaccccaataaactgtatggggggcggtattgtaacacattcggtactggcatgggctttggatccaatggatatgatacccgtaccacaggtcgtgggtggatgacggttgacaacaagttcaaacccaggggtagaggaaatagtttctacggtaatgagaacatggatggtttaaatgagctcaacaggggacctagaggtaaaggtttcaagaatcaaaagggttttacaccagtaacgctggcagtcaaggggcagaacgttccgctcaccctaaccaatgatgctgagaaagaaaaaccaagcctgattcctgacagagaacaatacaactgtccagattttccagtgacatatactgatgccaagttttttataatcaagtcttacagtgaggatgatgtgcacaaaagcatcaaatataatgtttgggctagcacaccaaatggtaacaagaagcttgattctgcttaccaggaggctaaacaaaagtctggtggttgccctgtttttcttttcttctcggtgaatacaagtggtcagtttgtcggtgttgcagagatggtaggaccagttgatttcaacaagagtttggagtattggcagcaagacaagtggatcggctgctttcctgtaaagtggcacatcgtgaaggatgtaccaaacagcttgttgaaaaacatcacgctggagaacaacgaaaacaagcctgttaccaacagtagagatactcaggaggtcaaaatagagcagggcctacaggtgattaagatatttaaggatcatattagcaaacagtgcatccttgatgattttgagttctatgaggatcgtcagaagagaattcaggaaaagaaggtcaagcagcagctattccagaagcagtcgcaggtatgggaaggcaaagctactgaagagaagaagaaagaaaacacgaaagtggaacctaagtcccagaaaccttcagaagttcctgctggtttgaacaaggaaagtttacccgctgctccgactaatggggaggtgaagcttacagaaaatggatcagttacaaagggagatgatatgaagggtgctaaaccagtcactgtagcggaaaagaaacctgtagctatagggatagcaaaaggagttgctaatggatgctagcttcacctaatgaagggggaggtctgtggttaaagaagccctaaattggagcttgttgactacatgatatgcacgccagtgcttggttagatctcataaccattggactgccccttttatcctagctgcatttggagttggttcttgcattaagaaatccccggagataaatcaatagtggcaaggctagttcaatctgtttctaagagttcaggaagtatggaagctccattttccctcaggttttagcttctgacaggtttcataccttggtttgggttttaggataatttttttttataattttgttttcgtcatgtggcttattttggtcaattttcccctttttttaaaagttatttgggttttaaagggtggggttcttgttattattagtttggctcccaatcctatcttgtaaatctagatcaatctgttgcggcagttcccaacattgcttttttgtactaatgattgagctagaagctagttttaaatgtcaagtctctaccgg

SEQ ID NO: 115 - DNA, 2089 bp, Nicotiana tabacum
ccacgcgtccgcccacgcgtccggcgggatttgtgagtatttgaatgaggaaaaagggtgtccagtgtgatgagatatgagggttaagattgtaggaaaatgggttgtgtatttgggaaagagatttcatcttctgagacacctaatggggaggttgtagttggaagtaggagagaaaatggggtagatagagatttggctgccccatctgggaggagagagaaagttggtactgtaaataaagtggatgccgtaggtggcggcggaggaggtagtgatgttggtgaagttgtgaatggtagggatcagaaggatgagaagaagggtgagaatgcaaggcataggggtgagaggagaaggtctaagcctaatccaaggctaagcaacccacctaagaatgtgcacggcgagcaagtggcggctggatggccgtcatggctttctgatgtagctggagaggctatcaatggttggattccgcgcagggcggatgcatttgagaagctagctaagattgggcaaggtacttatagcaatgtctataaagctagagataatctaacggggaacatcgttgcactgaagaaggttagatttgataatttggagccagagagtgtgagatttatggcaagagagatcttgattttgcgccgcttggatcatccaaatgttattacgttgcaaggattggttacgtcaaggatgtcttgtagtttgtacctcgtgtttgattatatggatcatgatttagctggacttgctgcaagccctggaatcaagttcacagaggctcaggttaaatgttacatgcatcaactattagcagggctcgaacactgtcataaccgtcttgtgttgcatcgcgatataaaaggatcaaatcttcttattgacagtgggggagcactcaagattgctgattttgggttggcttctttctttgatcccaataaaaagcagcccatgactagtcgtgtggttactctatggtacagaccaccagagcttctacttggagccaccgactatggtgttggtgttgatctttggagtgctggttgtattttagctgagctattagctgggaaacccattatgcctggtcgtacagaggttgaacagctccacaagatcttcaagctatgcggatctccgtcagaagaatattggataaagtcaaggcttccacatgcaactatattcaagcctcagcaatcatacagaagatgtatagcagaaacttttaaagattttccgccttcatcgttgccattgattgagactcttctggccattgatcctgctgagcgtcagacagctacaactgcattacagagtgcattctttactaccaaaccttacgcctgtgaaccttccagccttcccaaatatccacccagcaaagaaatggatgcaaaacggcgagacgaagaatctcgaagacaaagagctactgggaaagctaatgctgatggtgtaaggagaaatcgtcaccgtgatcgagcagtgagggcaatccctgctcctgaagccaatgcggagctgcaagtcaatatcgataggcggcgtctagtaacacaagcaaacgcgaagagcaagagtgaaaagtttcctcccccacaccaggatggaacattaggttataccttgggttcttcacatcacattgatccagcctatgaaccctcagaagttccattcacatccattaatttctcatattcaaaagaaccgatccaaacgtggtccggcccattggtggaacctgcaactggtgctccaagaagaaagacaaagccatcaaagaaggattctaacaagaaaggaaaagaaagcctgtaaagtctataatgaacgacgtgattctacaatggtatacttcaaggagctgcaaaacttacagattatttgtcctatacgtaaatcaagaagcttctcaacagcatagagaggtaaacaagcatttttatcgtagtattctcctttgtattcttttggataatgagaatcttttcattattgtacatgtaaattttgtttcttcatattagcaggctctgtttagatcaataaaatcgtaacgctc

SEQ ID NO: 116 - DNA, 2021 bp, Nicotiana tabacum
ccacgcgtccgccgttttccaacttccaatgcgcggcaaaccctaatcctcagctttggtttttgcctcagaaaattcatccgtcaatttgacctctattatggggcgcagtgactctagatcacctgccaggggtcgtggatctcctcgtaagaggagcccttcacgcagggaaaggtcacctgctcggaaaaagagttcacatgctgcaagttcagctgtagcagagaagccttcaaaccgtaataggtccccgagacgtgcaaggtcaagatctcttgttcctctttcacctgcaacagagaggccatctagtcgcaataggtccccaaagcgcagaaaatcaatctcccctgcatctcactccccagtcagagagaaaccctcgagtcgcacgaagtctcccaaacgagctaagtcaaggtctcctgattcgaggttgttacaggtagagaagtcttcaggccgagtcaggtctcctagacgtgccaagttgcagtctcctgaatctcgctcaccctcaccacgaacaaaaagactaaggagagcagaacaagagactgaagaaaagacaagggggcgcgagcctgagaaaaaccatgggagagctagtggtagggctgctctacatagggagaaggattctgatagaacagtgcctgaatcccgttcaccgtcaccacgaacaaaaagactaaggagagcagaacgagagactgaagaaaactcgagggagcgagagcctgagaaaaatcatgggagagctagtgatagggctacacatagggaaaaggattatgacagaacggtgcttgagtcccgttcaccgtcaccacgaactaaaagactaaggagagcagaaccagagactgaagaaaagttgaagatacgggagcccgagagaaatcatggaagagctagtgatagggctacacataaggaaaaagattctgacagaatggtgcaaaatgaaaggagagagaaaagatcaggaaaggatgcactggataatggatcttctaagtcaagaaatggtcgatcagcttcaccttcagaacgtcagcataggagtcggcacagatcgagatcacctgcagcagcggacacgagagcacgcgatgagatgacaagctcaaggagaggtgaactcaggaatggtgatgatgactccttatctaaaatgcaggcggcagaggaggccttgcaagctaaaaataaagacaagccttcgtttgagctctctggaaagcttgcagcagaaactaatcgagtaagaggtataacacttctctttaatgagccaccagatgctagaaaacccgacgtacgatggcgcttgtatgtttttaagggtggtgaagtccttaatgagcctctatatgttcatcgccaaagttgttatctttttgggagagaaaggagggttgcagacattcctacggatcacccatcttgcagcaagcaacatgctgtcctccagtacaggcaagttgagaaagacaatcccgatggtacttcatcgaagcaagtaaggccgtacgtaatggatcttggaagcactaatggtactttcattaatgaaaatcggattgagccccagagatactatgagctattagaaaaggatacacttaagtttggtaatagtagccgagagtatgtgctgcttcacgagaattcagcatgatgagtctctaaaatggttgacggaggtgtcatttgcattgattggctttgacgtcagaagctttatcagatcaaatatttgctgtgccatgttactagcaggatagccgttgtaagtgcttagccgaaatcgtgtaatgtggtagagatttgggcattgcttgcaaagtttttcactgctaatgaaaattttggtttatgcatcagtgatttatcctccagtttgtttataagctctttgtcccctatatatgggatatgttattgttgattaggtcttaacttgtgaatgtgcgctcttttcttctaattattgaagatgctggagtgccccc

SEQ ID NO: 117 - DNA, 1850 bp, Nicotiana tabacum
attagatgcgtttggctttgactcaagcccttgaatcaaaactgcaatcaccgttgtggcaggttcgtgtgaaagcaatctgtgtcctcgaggctatcttgaggaaaaaagatgacgagcactttggtattatggcatcttatttcaatgaaaataaagatgttgtggtgaaatgctttgaatctccccaagcgtcattaagagaaaaggcaaacaaagtcttaagtcttctgaatgatggacaaacagctgattctgtgcctcatgtagataggtcagcaatggctggtgcccctgttgttcagatgcccgacttgatagacacaggtaattccgatgatctgtttggagcagatgatttagcaaatatgcagagtggtgaagggataaaaattgcatccacctctggcgcccctctggttgatgatctatttggagacaatttgggtggcggcgtggcttccggccagcagaaaaatggtgatgacccctttgctgatgtctcatttcacaccagtaatgagaaggcgcttgaagctgatcacttttctggaatgacatttgataaaacagatgctactgaagtccatttggctgtcgatagaactggacctgaactgtttgacatgtttggtcccagtgttgaagttccccaggatcccaataatcctagaaaggagattcacgatttaatgaatagtctctctttgaatgggaatgactcatctaagaagcagaatggcagctcaaggggaacctatccggatatgtttcaagagtccactattgatcctcatcaggcttcgaatgatgccttgaacagcatattttcctcccaggctggtggagcaaattcaaatcccatgtttcctttgggtgctatgcagtataacttgcctcctggcttcgtattgaatccatcatttgctcctcaggctctaaactataatgccatgggtaacatgtttgctcaacagcagttctttgcaacactttccagttaccagcaattagctaccatgcacccatccactagtgctagtcatgccgctgattctgctggaggttatggttcagctcttcccgatatcttcaatcctagcatttctaatcatagtcctacttccttgatgaatacttcaaagaaagaagatacaaaagcatttgattttatctcggtaagtttggtccttgtgtacttcaatttttctattattactttgaagatgcattgaattgtgacggccctagtgtgtccctgattttgaaggtatgccattaacaattatgccttttgtttatctattttatttggcctaaatccctccttcctccactccaaaaagatgaggtcctccgcctttattcttgtggtgataaatgaggtccattgcattgtccttttccaggcccccagtcatgtaaagaataagtggacttggaaatactctggcatcataatcagctattccttttctgttaatgtacttagatatctcattgtagggcttctcagtgcttcatctttttttgtcaatgttgtgagcaataaagtttctcagttctgattgtgtgcaatatcatcttttccaaactgagaagactagaaaacttcatttaggactgtatgactctaattttgttgccatggtggattccctgtgttttttgcaggatcatttggctgcagctcgtgatccaaagagggtgatttgagtggttatagctcaaagcaacccagagtatgctgcttataagatttagctatgcacaatttgaagcaggagtaatctgtaaaggttcttttgaagcagtgatatcaatgtgaaatacagtattatttttttttt

SEQ ID NO: 118 - DNA, 1411 bp, Nicotiana tabacum
ccacgcgtccgaacgattctccctcgtaacttcattttcagtcatggcttctgctactaagaaggtattggttccgattgcgaacggaaccgagccgattgaggctatagtgcccatagatattttgcggagagctggtgcggaggttactgttgcctcagttgagaagcagcttcagattgaaggagtgcacggaattaagatcgttgctgatgctctaatttctgattgtgcggatactgaattcgaccttatctcacttccgggagggattcctggtgcaaccaacctaaggaattgcaagactttggaaagcatagtaaaaaagcaagctgaaaatggacggttttatgctgcaatatgcgctgctcctgctgtagcacttggatcatgggggcttctgaaggggctgaaagcaacatgttatccgtcgtatatggaggaactatcatcttataccattgctgttgagtcaagagtccaaaaggatggaacagttgtgacaagtcgaggaccaggaactgcgatcgagtatgctgttgcattggttgaggagttgtatggaaaagagaaggctgatgaagtttctggcccactcgtgatgcgcccaaatcacatcgaagaatttgcatttgctgagctcaattcagtaaattggacatttacgagtaagccacagattcttgtacctattgcgaatggttctgaggaaattgaagcagctactattatcgatgtacttcgacgagcaaatgctcaagtagtagtggcatctttggaagatacattggagattgtcgcttccagaaaagttaagctagtagcagatgtgctccttgatgaagctgctaagcagtcatatgatcttatcgtcctgccgggtggtcttggcggtgcccaagcatttgccaactcagaaaagttggttgacatgctgaagaagcagagagaatcaagcaaaccgtatggagcaatgtgtgcatctccggctctagtcctagagcaccatgggttgctcaagggtaaaaaggctactgcctttccagctatgtgcaataagctctcagatccaagcgaagcagaaaatagggtgttggttgatggcaatcttgttactagcagaggaccaggaactaccatggagtttgcactggccattgcagataagtttattggccgcaaggaagtactagtgctagcaaagaagatggttttctaagtagaatcattttgcctgtcttccgtctttaggattatataggcacccatagttacccatagttgtaaacttgtaataaactttggccatcagtgtgcacttaaaataaaagaaatgctgtatacgagttacactcagtcgcatttgctaatttcctattcaatgccatcgctttttaaaaaaaaaaaaaaa

SEQ ID NO: 119 - DNA, 284 bp, Nicotiana tabacum
  misc_feature (2)..(2): N = G, C, A or T
  misc_feature (6)..(6): N = G, C, A or T
  misc_feature (13)..(13): N = G, C, A or T
  misc_feature (16)..(16): N = G, C, A or T
  misc_feature (19)..(19): N = G, C, A or T
  misc_feature (30)..(30): N = G, C, A or T
  misc_feature (36)..(36): N = G, C, A or T
  misc_feature (39)..(39): N = G, C, A or T
  misc_feature (40)..(40): N = G, C, A or T
  misc_feature (49)..(49): N = G, C, A or T
  misc_feature (58)..(58): N = G, C, A or T
  misc_feature (59)..(59): N = G, C, A or T
  misc_feature (60)..(60): N = G, C, A or T
  misc_feature (63)..(63): N = G, C, A or T
  misc_feature (65)..(65): N = G, C, A or T
  misc_feature (69)..(69): N = G, C, A or T
  misc_feature (72)..(72): N = G, C, A or T
  misc_feature (77)..(77): N = G, C, A or T
  misc_feature (91)..(92): N = G, C, A or T
  misc_feature (97)..(97): N = G, C, A or T
  misc_feature (102)..(102): N = G, C, A or T
  misc_feature (109)..(109): N = G, C, A or T
  misc_feature (118)..(118): N = G, C, A or T
  misc_feature (127)..(127): N = G, C, A or T
  misc_feature (134)..(134): N = G, C, A or T
  misc_feature (138)..(138): N = G, C, A or T
  misc_feature (160)..(160): N = G, C, A or T
  misc_feature (186)..(186): N = G, C, A or T
  misc_feature (208)..(208): N = G, C, A or T
  misc_feature (211)..(211): N = G, C, A or T
  misc_feature (215)..(215): N = G, C, A or T
  misc_feature (272)..(272): N = G, C, A or T
gnatgnctgaccnagntgngtgcttaagtntcgcangcnnctgtagtgnaggggaccnnncantntctnctngacgnccgcagtaaccagnnctctnaaccnatgcatnatgcagatncaggctttncagtctnttanggctcaattggtgtatgcaagntccaggacatggtgtacgatcagatnatgatctgcaagcgaagaattntgntttntcaaatgctctttcaagccctgttcgacgaagcctgcagaactatcaaattgctcanggaggtttcctt

SEQ ID NO: 120 - DNA, 202 bp, Nicotiana tabacum
  misc_feature (29)..(29): N = G, C, A or T
  misc_feature (39)..(39): N = G, C, A or T
  misc_feature (41)..(41): N = G, C, A or T
  misc_feature (48)..(48): N = G, C, A or T
  misc_feature (58)..(58): N = G, C, A or T
  misc_feature (70)..(70): N = G, C, A or T
  misc_feature (79)..(80): N = G, C, A or T
  misc_feature (87)..(87): N = G, C, A or T
  misc_feature (90)..(90): N = G, C, A or T
  misc_feature (93)..(93): N = G, C, A or T
  misc_feature (97)..(97): N = G, C, A or T
  misc_feature (99)..(99): N = G, C, A or T
  misc_feature (108)..(109): N = G, C, A or T
  misc_feature (114)..(114): N = G, C, A or T
  misc_feature (125)..(125): N = G, C, A or T
  misc_feature (133)..(133): N = G, C, A or T
  misc_feature (175)..(176): N = G, C, A or T
  misc_feature (182)..(182): N = G, C, A or T
  misc_feature (186)..(186): N = G, C, A or T
  misc_feature (189)..(189): N = G, C, A or T
  misc_feature (191)..(191): N = G, C, A or T
actcgcggacggagaacaaccgagagaangggagacatngntccaaantcgtggactnccaatgtactgntgagcactnngtaactnatnatntggntnatgagggcnnggcangaataggcagnacgcgggngcaaaccctgcgaattgatacgatcagataaaagatcatcannatgganaggngcngntgttctggggt

SEQ ID NO: 121 - DNA, 222 bp, Nicotiana tabacum
  misc_feature (2)..(2): N = G, C, A or T
  misc_feature (16)..(17): N = G, C, A or T
  misc_feature (23)..(23): N = G, C, A or T
  misc_feature (28)..(28): N = G, C, A or T
  misc_feature (33)..(33): N = G, C, A or T
  misc_feature (81)..(81): N = G, C, A or T
  misc_feature (179)..(179): N = G, C, A or T
tntggctaagaactgnnctatanctagngacantgtgctattcgactcacaggaaaaactactaaaggattctctagattngcataatttccaagagataaaaaagtttttccatgctcacttcaaggtggatcgagaacttcaggcatctgttgctgtgtatgcattgaaaggccagngattctgttcttgatgagcaaaatagaatctacaagttggtgt

SEQ ID NO: 122 - DNA, 99 bp, Nicotiana tabacum
  misc_feature (3)..(3): N = G, C, A or T
  misc_feature (8)..(8): N = G, C, A or T
  misc_feature (14)..(14): N = G, C, A or T
  misc_feature (17)..(17): N = G, C, A or T
  misc_feature (24)..(24): N = G, C, A or T
  misc_feature (55)..(55): N = G, C, A or T
  misc_feature (57)..(57): N = G, C, A or T
  misc_feature (59)..(59): N = G, C, A or T
  misc_feature (70)..(71): N = G, C, A or T
  misc_feature (78)..(78): N = G, C, A or T
  misc_feature (80)..(80): N = G, C, A or T
  misc_feature (87)..(87): N = G, C, A or T
  misc_feature (91)..(91): N = G, C, A or T
  misc_feature (98)..(98): N = G, C, A or T
ggngaggngacggngantggagcngtagtgtcgcgggaggagggacaaaagctgnangnaagaacagcgnnacaagantnacacctnctgnaatatant

SEQ ID NO: 123 - DNA, 110 bp, Nicotiana tabacum
  misc_feature (64)..(64): N = G, C, A or T
  misc_feature (67)..(67): N = G, C, A or T
  misc_feature (100)..(100): N = G, C, A or T
  misc_feature (102)..(103): N = G, C, A or T
  misc_feature (104)..(104): N = G, C, A or T
aatagcagcggcagcatacgactacgagaacgatccgagatgggcagattactggtccaacatnctnattcctcctcacatggcttgccgttccgacgtngnnnaccact

SEQ ID NO: 124 - DNA, 128 bp, Nicotiana tabacum
  misc_feature (3)..(3): N = G, C, A or T
  misc_feature (6)..(6): N = G, C, A or T
  misc_feature (12)..(12): N = G, C, A or T
  misc_feature (39)..(39): N = G, C, A or T
  misc_feature (54)..(54): N = G, C, A or T
  misc_feature (69)..(69): N = G, C, A or T
  misc_feature (75)..(75): N = G, C, A or T
  misc_feature (77)..(77): N = G, C, A or T
  misc_feature (125)..(125): N = G, C, A or T
ttnagnatccgnaagttgagcaacaacttcagcactcgngcagagaatggaaantcgatgacattgtgnacgctngnggcagtgggggtacggacgctggattgtccattgcatccaggctcagnggc

SEQ ID NO: 125 - DNA, 155 bp, Nicotiana tabacum
  misc_feature (60)..(60): N = G, C, A or T
  misc_feature (65)..(65): N = G, C, A or T
  misc_feature (104)..(104): N = G, C, A or T
actccttacaaccagcagattgcaaattgctgcaagggaggagtgatcaactcatggggncaagnatactgcaacatgctgttagctcattccaagtcagtgtnggtgctgccggaacaaccaataaaacagttagagttcctaagaacttcacc

SEQ ID NO: 126 - DNA, 166 bp, Nicotiana tabacum
  misc_feature (63)..(63): N = G, C, A or T
gccagtcattcgttgtcccataagcccaacagccacccaaaaccatccaaatctgagctgttntccagcgctaagctagtggccgacgcggccaaagcaaaactccatcacgagccaaacagtaaggtcgacaagtctgagctcgccggagccgccgctgacctcc

SEQ ID NO: 127 - DNA, 235 bp, Nicotiana tabacum
  misc_feature (5)..(5): N = G, C, A or T
  misc_feature (67)..(67): N = G, C, A or T
  misc_feature (116)..(116): N = G, C, A or T
agagncaaatcccacatggggcatctggcttgggcggatgcttttgtcatcacagcagattcatgtntagacatgttgagtgaggcttgcagtactgggaagcctgtgtatgtagntggagctgaacgctgtacgtggaagctcacagatttccacaagacactcagagagaggggactgactaggccattcacaggacttgaggatatgtcagaaagttggagttaccctccgc

SEQ ID NO: 128 - DNA, 121 bp, Nicotiana tabacum
  misc_feature (14)..(14): N = G, C, A or T
caacaagaggaaantggagttcaattgacttgggaactgaaatttatagagacgctaatcaagtggctgagtggactgtctctgattttgacattcttgtacccaataacaattagaagta

SEQ ID NO: 129 - DNA, 237 bp, Nicotiana tabacum
cttttgctagaatcttgcaagctggacaaggtgaaatggtcgggagtgaaaacacagcattcaacaaccccgttcgttgatgaaatgtacgagcgcctgaaagaaactctaactgactatgaggtcatcatctgccgttggccggagtacacatttgcattggagaatgccattgctgatattgagaaagcaattttggatgcactagagaagcaatatgcagatgtcttgtcacca

SEQ ID NO: 130 - DNA, 169 bp, Nicotiana tabacum
cagaaaaggaggaaaaaatgagaaaatatcttctgcttagagtgttgtcaaagcttttgccctcactgccttccttctcatcatttttgtcctcttctcttggtctctctctgtataattatgtagtagataaaacttcaagtattcatttgaggtttttgtttcctaa

SEQ ID NO: 131 - DNA, 66 bp, Nicotiana tabacum
  misc_feature (5)..(5): N = G, C, A or T
  misc_feature (17)..(17): N = G, C, A or T
  misc_feature (18)..(18): N = G, C, A or T
  misc_feature (49)..(50): N = G, C, A or T
  misc_feature (58)..(58): N = G, C, A or T
  misc_feature (64)..(64): N = G, C, A or T
  misc_feature (66)..(66): N = G, C, A or T
ctctncctcacacgaannagtacttgacaagggagttagtactttatanngacgacantttagncn

SEQ ID NO: 132 - DNA, 106 bp, Nicotiana tabacum
  misc_feature (1)..(1): N = G, C, A or T
  misc_feature (3)..(3): N = G, C, A or T
  misc_feature (11)..(11): N = G, C, A or T
  misc_feature (13)..(13): N = G, C, A or T
  misc_feature (19)..(19): N = G, C, A or T
  misc_feature (97)..(97): N = G, C, A or T
ntnccatgttnanaaaatncaagctctgaatggaaacggcttgggtgctgatacttcttcctttggtttcttgggacagattcctcgaaacttcagnttgtcggac

SEQ ID NO: 133 - DNA, 189 bp, Nicotiana tabacum
  misc_feature (5)..(5): N = G, C, A or T
gtagnattctccatttgaaaatacatagtgtcaggccatctgggacatcaaacggaggtggagagactagtctaagggcaaggagaccaccaagccaagatcaggatgctgcattagcattgcgattgcagtataggaattctcttgctctggccagatcgaatttgagggccatggcatcaagagcca

SEQ ID NO: 134 - DNA, 246 bp, Nicotiana tabacum
  misc_feature (1)..(4): N = G, C, A or T
  misc_feature (6)..(6): N = G, C, A or T
  misc_feature (9)..(9): N = G, C, A or T
  misc_feature (11)..(11): N = G, C, A or T
  misc_feature (16)..(16): N = G, C, A or T
  misc_feature (31)..(31): N = G, C, A or T
  misc_feature (34)..(34): N = G, C, A or T
  misc_feature (73)..(73): N = G, C, A or T
  misc_feature (97)..(97): N = G, C, A or T
  misc_feature (147)..(147): N = G, C, A or T
nnnngnatntntctgntataatcttgcaagntgnacaaggtgaaatggtcgggagtgaaaacacagcattcancaaccccgttcgttgatgaaatgnacgagcgcctgaaagaaactctaactgactatgaggtcatcatctgccgntggccggagtacacatttgcattggagaatgccattgctgatattgagaaagcaattttggatgcactagagaagcaatatgcagatgtcttgtcacca

SEQ ID NO: 135 - DNA, 202 bp, Nicotiana tabacum
  misc_feature (53)..(53): N = G, C, A or T
  misc_feature (65)..(65): N = G, C, A or T
  misc_feature (99)..(99): N = G, C, A or T
  misc_feature (158)..(158): N = G, C, A or T
  misc_feature (176)..(177): N = G, C, A or T
  misc_feature (182)..(182): N = G, C, A or T
tctgggtatcatttgggctgttcggtacaagacggatacggagagtcacttangagaaactgttnggaagagagagaaagaggcgggaaactattggcnaggtgtgtggaggaattgaagagaaaaggggtggagtttgatttgttgaaagaggttgncgctcttaggagggctannagttngagggttgaaactaaggttg

SEQ ID NO: 136 - DNA, 140 bp, Nicotiana tabacum
gcacgtttggctcgtctgctctcccgcaagaaagtgcgagtgatatggatatcagtagttcagtacttttgttagggtcagcttgttggggaatccggttcttttgttattaggtggtaaaagaaacttttatgtcgctg

SEQ ID NO: 137 - DNA, 222 bp, Nicotiana tabacum
  misc_feature (4)..(4): N = G, C, A or T
  misc_feature (6)..(6): N = G, C, A or T
  misc_feature (92)..(92): N = G, C, A or T
ttangngccaatgtttcaatacacattgcccccgccatgaatatcggaacaatgacacaattatttgatgtagcacaagaagagtgttcagnccttttcttgtggacttatttggttgcagcatttgcacttactatttggtccactgtattcatgtggctcttgtcctgattgtcacaagaagacacaatatgaagatattatataatggtgtggtgtgct

SEQ ID NO: 138 - DNA, 62 bp, Nicotiana tabacum
  misc_feature (11)..(11): N = G, C, A or T
tgaactgaatntggtatctgtattactcctgttgtaatggcattggacttatacggccttgg

SEQ ID NO: 139 - DNA, 117 bp, Nicotiana tabacum
tgtttgtcttccggctttgagggctttccagatggtacatatgaaggagttgaaactggatatgacgaattatttaggacgccatcatccctcacggagagcccagacattctctgg

SEQ ID NO: 140 - DNA, 219 bp, Nicotiana tabacum
  misc_feature (6)..(7): N = G, C, A or T
  misc_feature (11)..(11): N = G, C, A or T
  misc_feature (14)..(15): N = G, C, A or T
  misc_feature (18)..(18): N = G, C, A or T
  misc_feature (29)..(29): N = G, C, A or T
  misc_feature (31)..(31): N = G, C, A or T
  misc_feature (32)..(32): N = G, C, A or T
  misc_feature (40)..(40): N = G, C, A or T
  misc_feature (81)..(81): N = G, C, A or T
  misc_feature (132)..(132): N = G, C, A or T
  misc_feature (157)..(157): N = G, C, A or T
  misc_feature (177)..(177): N = G, C, A or T
  misc_feature (183)..(183): N = G, C, A or T
  misc_feature (195)..(195): N = G, C, A or T
  misc_feature (214)..(214): N = G, C, A or T
ttgaanncccnttnngangcaccacaagntnnaatccttnctgtaaatggtagcaaaatcctacccgattggggatacggnagagtttatactgatttagttatcaattgcactttccctattccagttggnactgaaaatggaggaaaactcgtanttcatgccgctactaacggnggcggngacactaaattnaacaccgccgacacttttntaggg

SEQ ID NO: 141 - DNA, 224 bp, Nicotiana tabacum
  misc_feature (3)..(3): N = G, C, A or T
  misc_feature (14)..(14): N = G, C, A or T
  misc_feature (39)..(39): N = G, C, A or T
canaataccccttnaaacgacccgagtctcaaaatcgangagattggaacactttcggtcagtacttgaggaatcaaaggccaccagtttccatatcccaatgttatagcaaccatgtcctagagttcctccgatacctggaccagttcgggaaaactaaggttcacttacaaggttgtatcttttatggacagcccgagccgccagctccctgtacttgtccg

SEQ ID NO: 142 - DNA, 95 bp, Nicotiana tabacum
  misc_feature (3)..(3): N = G, C, A or T
  misc_feature (8)..(8): N = G, C, A or T
  misc_feature (10)..(10): N = G, C, A or T
  misc_feature (35)..(36): N = G, C, A or T
  misc_feature (38)..(38): N = G, C, A or T
  misc_feature (41)..(41): N = G, C, A or T
  misc_feature (67)..(67): N = G, C, A or T
  misc_feature (78)..(78): N = G, C, A or T
  misc_feature (80)..(80): N = G, C, A or T
ctngtggnantaaataacattctcatttctttccnntnttnttcaggtccagtaccaccaatggagnctttccctatnantaattcatatagtcg

SEQ ID NO: 143 - DNA, 178 bp, Nicotiana tabacum
  misc_feature (2)..(2): N = G, C, A or T
  misc_feature (10)..(10): N = G, C, A or T
  misc_feature (12)..(12): N = G, C, A or T
  misc_feature (26)..(26): N = G, C, A or T
gngatgtctncntattgcacatctgntgttgattcactttatgggaatgctcagaaatttcaagcaatcgagacagataatcgcaggcaacgagcagctctagtgaccttacaggaaaaggtagatgctgttgcttacccaagaggaactctgggtgaaaaatacgtgcatacttccg

SEQ ID NO: 144 - DNA, 153 bp, Nicotiana tabacum
gaatggaaaaagtgaaagtgaattgcttgacggatgccgagtgctactatacatggctacttgtaaccaccctgctagtatttgatgaactgctgaagtctataaggccgtatggcactcttagtttgttgtccgcgctgatgtgtgaagtca

SEQ ID NO: 145 - DNA, 211 bp, Nicotiana tabacum
  misc_feature (185)..(185): N = G, C, A or T
gttcctttgccatttcagctgccggcggcagtatcttcacctgggacgacgtctttcaactccccgaatctcctcaaaatgactcttctaccctctcagctttcttcgataaaatcaagctctgtaatcgcaattcggagaagcaatccgagttcatgcctttcgtgattgaagaccaaataatnggatacgtacaccacgtggttgctga

SEQ ID NO: 146 - DNA, 225 bp, Nicotiana tabacum
  misc_feature (4)..(4): N = G, C, A or T
  misc_feature (13)..(13): N = G, C, A or T
  misc_feature (27)..(27): N = G, C, A or T
  misc_feature (32)..(32): N = G, C, A or T
  misc_feature (63)..(63): N = G, C, A or T
  misc_feature (70)..(70): N = G, C, A or T
  misc_feature (77)..(77): N = G, C, A or T
  misc_feature (100)..(100): N = G, C, A or T
  misc_feature (111)..(111): N = G, C, A or T
  misc_feature (112)..(112): N = G, C, A or T
  misc_feature (115)..(115): N = G, C, A or T
  misc_feature (121)..(121): N = G, C, A or T
  misc_feature (140)..(140): N = G, C, A or T
  misc_feature (160)..(160): N = G, C, A or T
  misc_feature (161)..(161): N = G, C, A or T
  misc_feature (218)..(218): N = G, C, A or T
agantttaactcnatccattactgtanatggnatgcaaaatcctacccgattggggatacggnagagttnatactgntttatgctatcaattgcactttncctattccagnnggnactganaatggaggaaaactcgtanttcatgccgctactaacggnngcggagacactaaattcaacaccgccgacactttcgtagggttactcaggactcatnaagaagg

SEQ ID NO: 147 - DNA, 282 bp, Nicotiana tabacum
  misc_feature (4)..(4): N = G, C, A or T
  misc_feature (20)..(20): N = G, C, A or T
  misc_feature (28)..(28): N = G, C, A or T
  misc_feature (143)..(143): N = G, C, A or T
  misc_feature (145)..(145): N = G, C, A or T
tttncacactaattcccctntatctacnaatgaagtgcgtgggcttgcagtacctggaggccattcgtaagctcaaggcttctggcttccaaccaacgcgcactgtctacctttccttcgtccccgacgaggaaatcggcggngncgatggagccggaaagtttgtcgattccgatgtcttcgtgaagatgaatgttgggattgtacttgacgagggcttgccttctcccaccgaaaactatcgtgcattctatggggagaggtccccctggtggctggtcg

SEQ ID NO: 148 - DNA, 324 bp, Nicotiana tabacum
  misc_feature (2)..(2): N = G, C, A or T
  misc_feature (19)..(19): N = G, C, A or T
  misc_feature (20)..(20): N = G, C, A or T
  misc_feature (22)..(22): N = G, C, A or T
  misc_feature (24)..(24): N = G, C, A or T
  misc_feature (33)..(33): N = G, C, A or T
  misc_feature (38)..(38): N = G, C, A or T
  misc_feature (52)..(52): N = G, C, A or T
  misc_feature (56)..(56): N = G, C, A or T
  misc_feature (64)..(64): N = G, C, A or T
  misc_feature (67)..(67): N = G, C, A or T
  misc_feature (70)..(71): N = G, C, A or T
  misc_feature (88)..(88): N = G, C, A or T
  misc_feature (117)..(117): N = G, C, A or T
  misc_feature (132)..(132): N = G, C, A or T
  misc_feature (302)..(302): N = G, C, A or T
gntccgtaaagtccccagnntncncgacccgtnactcnggagttacagcganacangtggctgnatnatnngacatactcagacctanttagctttgatataatccgtgagggtaanttcgttctttgcaancaaatggacgaacctggtatgtttagcctaattgcaaacaggtttgctgatgcttttatttcatgggtttcaatttgtactaaagctcacttgccgttcttcatgtactagaaaactacatatgtctatgaccctttacctagtctggtaatttcaaggcatgagattgngattgatcaaaacaagttggag

SEQ ID NO: 149 - DNA, 338 bp, Nicotiana tabacum
  misc_feature (111)..(111): N = G, C, A or T
  misc_feature (310)..(310): N = G, C, A or T
  misc_feature (334)..(334): N = G, C, A or T
ggtaactccgatatcatcgagagccgatacgcactcacaaagcggcaaggtgctcgctatgtgcctgctgctttcttgactggtttgcttgacccggtaaagtccagggangaatttgtccaactatttgctgagttagagggtaggataccagttctagttctggcaacagcaggttctccgaagaggtcaaaagcagagatggaagcacttatggaggccaaaggggtgagcaagtatatcgaagtgccaggtgctctccttccccaggaagagtatcctgaaatagttgcagaacagctttacaggnttctgcaagagaagtttgagcttnaggc

SEQ ID NO: 150 - DNA, 237 bp, Nicotiana tabacum
  misc_feature (5)..(6): N = G, C, A or T
  misc_feature (25)..(25): N = G, C, A or T
  misc_feature (29)..(30): N = G, C, A or T
  misc_feature (35)..(35): N = G, C, A or T
  misc_feature (48)..(48): N = G, C, A or T
  misc_feature (72)..(72): N = G, C, A or T
ttttnncacttctaaaaccctcgtntgannctgcnaggcatgtgaagntgtcaaactcaaaccttatgccanaaagtgcaagaaactgatctttgaatatgcgccagtgattctcgtaaatgctgaacagtttctggaaaaaaatgacgtatgtgctattcttcatgattgagagcctgcagcagataaagagctacaagcatcaccaaagatgcaagcttcattgcattcggcctc

SEQ ID NO: 151 - DNA, 231 bp, Nicotiana tabacum
  misc_feature (4)..(4): N = G, C, A or T
  misc_feature (90)..(90): N = G, C, A or T
  misc_feature (99)..(99): N = G, C, A or T
  misc_feature (153)..(153): N = G, C, A or T
  misc_feature (186)..(186): N = G, C, A or T
ctgnccctatccgatccaatagttgactcaaaggtgttgcctattccagccggagatttgagttttggttcgggtgcacaactgaaaaantcagttggnaattggtcaagatgtcttactgatttgtttggcatagatgctgaagattccggncaaaatgatgaaggcagcttcggagatgatcanaggaaaggtggaaatcaaccagagcatttccatcttctcaatgcc

SEQ ID NO: 152 - DNA, 78 bp, Nicotiana tabacum
aatcctgttcaataccaaaatcaagcaacaaacggttggcaagcttcttggaaaaagtttttgatagatatgatgtac

SEQ ID NO: 153 - DNA, 234 bp, Nicotiana tabacum
tcaactgagaggtgtgggaagaaatgaagaattgttgatggcttattttgcagaaagccttatgggagtagctccgaatggtttatggatcaagacacgtctcgctggtatgtctgggatgacatggcacaggcctttgtcaaacggttccaatacaacatcgacattgcccagaccacatttccctttcaaacctgaagaagaaaccaagtgaaagtttcagggaatatgcca

SEQ ID NO: 154 - DNA, 119 bp, Nicotiana tabacum
  misc_feature (22)..(22): N = G, C, A or T
  misc_feature (29)..(29): N = G, C, A or T
  misc_feature (73)..(73): N = G, C, A or T
ctgggtgaaaaagctctccttntgccttnccagaagcacctagcgcaacatgtaatggatagatgtgctcggnccatggatgtgcaacttttgcatgcggagccttcatgtcatagtta

SEQ ID NO: 155 - DNA, 52 bp, Nicotiana tabacum
  misc_feature (11)..(11): N = G, C, A or T
cgctgctgtgngttgaattttctcccattttttggagaggtgtgtatctgga

SEQ ID NO: 156 - DNA, 158 bp, Nicotiana tabacum
  misc_feature (110)..(110): N = G, C, A or T
  misc_feature (141)..(141): N = G, C, A or T
  misc_feature (157)..(157): N = G, C, A or T
aatggagaatggaaaaagtgaaagtgaattgcttgacggatgccgagtgctactatacatggctactgtaaccaccctgctagtatttgatgaactgctgaagtctatanggccgtatggcactcttagtttgttgtccgngctgatgtgtgaagtna

SEQ ID NO: 157 - DNA, 150 bp, Nicotiana tabacum
  misc_feature (2)..(2): N = G, C, A or T
  misc_feature (21)..(21): N = G, C, A or T
gntatgttgctgatcaatctngttatggcatggttgatccttctcagcattattatccggagcaaccatccaagccgcagccaagcatttcgaacagtccttatgctgagaattatcaacagccatttggttcttcatacagtagcggct

SEQ ID NO: 158 - DNA, 95 bp, Nicotiana tabacum
tacccaaaaataaaagtaccatcctgatgcatcctaatgtgctacatattgcaatcttcatgggtaaaagaggtcatttggcggaccaatgaggt

SEQ ID NO: 159 - DNA, 230 bp, Nicotiana tabacum
  misc_feature (11)..(11): N = G, C, A or T
  misc_feature (184)..(184): N = G, C, A or T
  misc_feature (213)..(213): N = G, C, A or T
  misc_feature (220)..(220): N = G, C, A or T
acggggcctcnaggctaataaacaaacagaaaatgaaaattcttttgagaaagagttgctaaaaatgcaagaaaaacttcaaaagatgacacttgagaaggagcagactgaggaaatgttgaaagctagagaggatatgttgaagcagaaggaggaagagctcgaagctcgggataaagagcangaaaagcttcaaattgaactcaaaaagtngcagaanatgaaagagt

SEQ ID NO: 160 - DNA, 342 bp, Nicotiana tabacum
  misc_feature (5)..(6): N = G, C, A or T
  misc_feature (9)..(9): N = G, C, A or T
  misc_feature (17)..(18): N = G, C, A or T
  misc_feature (20)..(20): N = G, C, A or T
  misc_feature (25)..(25): N = G, C, A or T
  misc_feature (66)..(66): N = G, C, A or T
  misc_feature (133)..(133): N = G, C, A or T
  misc_feature (205)..(205): N = G, C, A or T
  misc_feature (331)..(331): N = G, C, A or T
  misc_feature (338)..(338): N = G, C, A or T
ttttnngangtactaanncncattntagccgaccgcactcacaaagcggcaaggcgctcgctatgngcctgctgctttcttgactggtttgcttgacccggtaaagtccagggaagaatttgtccaactattngctgagttagagggtaggataccagttctagttctggcaacagcaggttctccgaagaggtcaaaagcaganatggaagcacttatggaggccaaaggggtgagcaagtatatcgaagtgccaggtgctctccttccccaggaagagtatcctgaaatagttgcagaacagctttacaggtttctgcaagagaagttngagcttnaggc

SEQ ID NO: 161 - DNA, 75 bp, Nicotiana tabacum
  misc_feature (6)..(6): N = G, C, A or T
  misc_feature (10)..(10): N = G, C, A or T
  misc_feature (14)..(14): N = G, C, A or T
  misc_feature (34)..(34): N = G, C, A or T
  misc_feature (74)..(74): N = G, C, A or T
taatcncacnaatngaggccctatgcaaatctcnttcaagtggagtttgcttcatacttgcattattgtcactnt

SEQ ID NO: 162 - DNA, 79 bp, Nicotiana tabacum
  misc_feature (42)..(42): N = G, C, A or T
ttattgggtaattcccatctactgggtctttctcaagatttntcaactgcatctgtagccagtgataacaagcaggatg

SEQ ID NO: 163 - DNA, 116 bp, Nicotiana tabacum
  misc_feature (11)..(11): N = G, C, A or T
  misc_feature (27)..(27): N = G, C, A or T
  misc_feature (28)..(28): N = G, C, A or T
  misc_feature (79)..(79): N = G, C, A or T
  misc_feature (109)..(109): N = G, C, A or T
aagtaaactcncggtagggaaactacnncgatgaaggtcttcagtcagctgaactacttggatgtgctcatatccgttngaatgagcttgagcctggtaaagtaaaggntatttgg

SEQ ID NO: 164 - DNA, 137 bp, Nicotiana tabacum
  misc_feature (2)..(2): N = G, C, A or T
  misc_feature (8)..(8): N = G, C, A or T
  misc_feature (28)..(28): N = G, C, A or T
  misc_feature (34)..(34): N = G, C, A or T
  misc_feature (37)..(37): N = G, C, A or T
  misc_feature (115)..(115): N = G, C, A or T
  misc_feature (126)..(126): N = G, C, A or T
gncgcganttccttcgtccaagactgangctttntanttcaaacaggtagttcaaatgcttactgggtcctctgaaaccgccaaggttgcagctactccgggtcgggctgagccngttagacatcntatcccgccca

SEQ ID NO: 165 - DNA, 189 bp, Nicotiana tabacum
  misc_feature (9)..(9): N = G, C, A or T
  misc_feature (42)..(42): N = G, C, A or T
  misc_feature (119)..(119): N = G, C, A or T
tgctgtgantcttttgctacatatgcctacgatttacgaatntgcaaataatgttggattttccaggcatcttcagaattgcctatggtgcaaattgcttttcagtatactgttgttgncccaccagatgaacttgcaaatgcaggatcaagttctacaacaagaacaaagcattccctcaaaaggaga

SEQ ID NO: 166 - DNA, 276 bp, Nicotiana tabacum
  misc_feature (5)..(5): N = G, C, A or T
  misc_feature (60)..(60): N = G, C, A or T
  misc_feature (94)..(94): N = G, C, A or T
  misc_feature (99)..(99): N = G, C, A or T
  misc_feature (241)..(241): N = G, C, A or T
  misc_feature (244)..(244): N = G, C, A or T
gcacntgtcgaaaatcaggattgatgtcaatgctgatcagcacccctttcagtacaaaanctaaatcaaccacagaagccagctaaggtggacntgaantccgcagtttatcctggcggtccaccttcaccggcaagggcgccaaagatgtcgcactttgtcgatacaacagaaatggtaagaggacctgaggagtcacctggctactgggtggtaactggtgcaaagctatgtgtagaanatngtaggataagaatgaaagtgaagtactcgctc

SEQ ID NO: 167 - DNA, 113 bp, Nicotiana tabacum
  misc_feature (7)..(7): N = G, C, A or T
  misc_feature (16)..(17): N = G, C, A or T
  misc_feature (19)..(19): N = G, C, A or T
  misc_feature (41)..(41): N = G, C, A or T
  misc_feature (53)..(53): N = G, C, A or T
ccttttnaggccacgnntnggagcagcaaacacagcaaatntagcgatgaganagccagtattcataaaagtggatcagttgaaaccgggaacaagtggtcacaatctgacgg

SEQ ID NO: 168 - DNA, 318 bp, Nicotiana tabacum
ctcctactcctcagtgtttctcagccagccgtggaactacaaaggccactccatctaaggcaaagtatagacctctggagacaaggggtatccttcaagaactggaacagagcagcaatgaagagaagagaaaggaagatcaagggaagatgatgagtaataatcaacaaggacagagaggtggtgctattgttgctgaaaaagaagctgctgctagagctttggatgtcttctggttcttgaaaccttgcactctttccagctgaaatggtcaaagcccactgctgcagaacatttcatgaagtgattctttcatac

SEQ ID NO: 169 - DNA, 200 bp, Nicotiana tabacum
gttccctcctaccaaacttgaggaaatcaagtctatgcacagcccacagttagcacaaagggcttacagccaagagtcaatgtactaagaggagaaaggagccccagattgacgggcaagggacttgaaataaagcaaactcctagcccccagccatctaatctgggtcaaaatggtcgtggtccgtcttctacctagta

SEQ ID NO: 170 - DNA, 190 bp, Nicotiana tabacum
  misc_feature (1)..(1): N = G, C, A or T
  misc_feature (4)..(4): N = G, C, A or T
  misc_feature (8)..(8): N = G, C, A or T
  misc_feature (16)..(16): N = G, C, A or T
  misc_feature (21)..(21): N = G, C, A or T
  misc_feature (27)..(27): N = G, C, A or T
  misc_feature (41)..(41): N = G, C, A or T
  misc_feature (59)..(59): N = G, C, A or T
  misc_feature (80)..(80): N = G, C, A or T
  misc_feature (109)..(110): N = G, C, A or T
  misc_feature (115)..(115): N = G, C, A or T
  misc_feature (170)..(170): N = G, C, A or T
  misc_feature (181)..(181): N = G, C, A or T
ntcnagantgatcgancaganggtgcngatgatactttggnaaggcctagtgaagaggncaactccagataatgaatcanagtttcaggtggaacaagagagagagcanntagcngcggacgaaagggaagagggagagctaattgctgatcctgaagatgttggaaatntcgagggagtnagcaattta

SEQ ID NO: 171 - DNA, 237 bp, Nicotiana tabacum
  misc_feature (6)..(6): N = G, C, A or T
  misc_feature (9)..(9): N = G, C, A or T
  misc_feature (10)..(10): N = G, C, A or T
  misc_feature (12)..(12): N = G, C, A or T
  misc_feature (16)..(16): N = G, C, A or T
  misc_feature (20)..(20): N = G, C, A or T
  misc_feature (30)..(30): N = G, C, A or T
  misc_feature (35)..(36): N = G, C, A or T
  misc_feature (53)..(53): N = G, C, A or T
  misc_feature (62)..(62): N = G, C, A or T
  misc_feature (64)..(64): N = G, C, A or T
  misc_feature (68)..(68): N = G, C, A or T
  misc_feature (72)..(72): N = G, C, A or T
  misc_feature (85)..(85): N = G, C, A or T
  misc_feature (102)..(102): N = G, C, A or T
  misc_feature (107)..(107): N = G, C, A or T
  misc_feature (120)..(120): N = G, C, A or T
  misc_feature (131)..(131): N = G, C, A or T
  misc_feature (133)..(133): N = G, C, A or T
  misc_feature (138)..(138): N = G, C, A or T
  misc_feature (151)..(151): N = G, C, A or T
  misc_feature (155)..(155): N = G, C, A or T
  misc_feature (170)..(170): N = G, C, A or T
  misc_feature (181)..(181): N = G, C, A or T
  misc_feature (183)..(183): N = G, C, A or T
  misc_feature (192)..(192): N = G, C, A or T
  misc_feature (200)..(200): N = G, C, A or T
  misc_feature (210)..(210): N = G, C, A or T
  misc_feature (213)..(213): N = G, C, A or T
  misc_feature (228)..(228): N = G, C, A or T
  misc_feature (229)..(229): N = G, C, A or T
taaggncanncnaagnccancagtgccatnacgcnnattgcctgactgttcantgcctacantntgcngtanttctaatggcganctgaaaatggccaaggnccccnaaacctagagctntgtcagtagantngggtntatatttgaattngatnctgttgagtgataangatggtggacncnttgtacctntacctgantgcaaataangtnttgtcatcaacagannttatgcta

SEQ ID NO: 172 - DNA, 286 bp, Nicotiana tabacum
  misc_feature (7)..(7): N = G, C, A or T
  misc_feature (9)..(9): N = G, C, A or T
  misc_feature (13)..(13): N = G, C, A or T
  misc_feature (15)..(15): N = G, C, A or T
  misc_feature (30)..(30): N = G, C, A or T
  misc_feature (37)..(37): N = G, C, A or T
  misc_feature (38)..(39): N = G, C, A or T
  misc_feature (46)..(46): N = G, C, A or T
  misc_feature (52)..(53): N = G, C, A or T
  misc_feature (56)..(57): N = G, C, A or T
  misc_feature (59)..(59): N = G, C, A or T
  misc_feature (61)..(61): N = G, C, A or T
  misc_feature (66)..(67): N = G, C, A or T
  misc_feature (68)..(68): N = G, C, A or T
  misc_feature (70)..(70): N = G, C, A or T
  misc_feature (77)..(77): N = G, C, A or T
  misc_feature (79)..(79): N = G, C, A or T
  misc_feature (89)..(89): N = G, C, A or T
  misc_feature (106)..(106): N = G, C, A or T
  misc_feature (113)..(113): N = G, C, A or T
  misc_feature (123)..(123): N = G, C, A or T
  misc_feature (131)..(131): N = G, C, A or T
  misc_feature (133)..(133): N = G, C, A or T
  misc_feature (139)..(139): N = G, C, A or T
  misc_feature (144)..(144): N = G, C, A or T
  misc_feature (147)..(147): N = G, C, A or T
  misc_feature (153)..(153): N = G, C, A or T
  misc_feature (174)..(174): N = G, C, A or T
gttaagngnggcnangaggaggctgtttcnatgcagnnngtctggnctatcnngtnntntntaggnnnanatcctangnctcacctggntctctttaaccctgagnatcattncaccactttnactcaatntnctcagncccanctnttcctntcaaaattcgaaattattgtncccatagtatatactctgtttctggtcctccttttcctctgtgctgtagccacaattacatacagcacgcttcatgtatcctatggtagacctatcaacctcgtttcctcta

SEQ ID NO: 173 - DNA, 286 bp, Nicotiana tabacum; identical to SEQ ID NO: 172
  misc_feature (7)..(7): N = G, C, A or T
  misc_feature (9)..(9): N = G, C, A or T
  misc_feature (13)..(13): N = G, C, A or T
  misc_feature (15)..(15): N = G, C, A or T
  misc_feature (30)..(30): N = G, C, A or T
  misc_feature (37)..(39): N = G, C, A or T
  misc_feature (46)..(46): N = G, C, A or T
  misc_feature (52)..(53): N = G, C, A or T
  misc_feature (56)..(57): N = G, C, A or T
  misc_feature (59)..(59): N = G, C, A or T
  misc_feature (61)..(61): N = G, C, A or T
  misc_feature (66)..(68): N = G, C, A or T
  misc_feature (70)..(70): N = G, C, A or T
  misc_feature (77)..(77): N = G, C, A or T
  misc_feature (79)..(79): N = G, C, A or T
  misc_feature (89)..(89): N = G, C, A or T
  misc_feature (106)..(106): N = G, C, A or T
  misc_feature (113)..(113): N = G, C, A or T
  misc_feature (123)..(123): N = G, C, A or T
  misc_feature (131)..(131): N = G, C, A or T
  misc_feature (133)..(133): N = G, C, A or T
  misc_feature (139)..(139): N = G, C, A or T
  misc_feature (144)..(144): N = G, C, A or T
  misc_feature (147)..(147): N = G, C, A or T
  misc_feature (153)..(153): N = G, C, A or T
  misc_feature (174)..(174): N = G, C, A or T

SEQ ID NO: 174 - DNA, 107 bp, Nicotiana tabacum
  misc_feature (5)..(5): N = G, C, A or T
  misc_feature (61)..(61): N = G, C, A or T
  misc_feature (75)..(75): N = G, C, A or T
gtcgngcaaaagaagttgtggctcacaagtggaagcatcagagatacagaatagacagtgnagtttgaacacttnttcctgatttattttctctctgcctttaggga

SEQ ID NO: 175 - DNA, 72 bp, Nicotiana tabacum
  misc_feature (28)..(28): N = G, C, A or T
  misc_feature (31)..(31): N = G, C, A or T
  misc_feature (71)..(71): N = G, C, A or T
atgagaagccaaggagtccctagtcttncgngcttgttacctggggcccaaaggagcaactagtgactcgna

SEQ ID NO: 176 - DNA, 108 bp, Nicotiana tabacum
  misc_feature (1)..(2): N = G, C, A or T
  misc_feature (65)..(65): N = G, C, A or T
  misc_feature (104)..(104): N = G, C, A or T
nntcatcacctatgccactactcttcttctggagaggcgtgggaaagagattgtcttgaaagcantgggcacaggcaattagcaaaacagttgctatagcaganatca

SEQ ID NO: 177 - DNA, 124 bp, Nicotiana tabacum
  misc_feature (55)..(55): N = G, C, A or T
  misc_feature (80)..(80): N = G, C, A or T
  misc_feature (83)..(83): N = G, C, A or T
  misc_feature (93)..(93): N = G, C, A or T
  misc_feature (102)..(102): N = G, C, A or T
ttcggccaagctgacgcttcctctttcaaacaggtagatcaaatgcttactgggncctctgaaaccgccaaggttgcagntantccgggtcgngctgagccngttagacatcctatcccgccca

SEQ ID NO: 178 - DNA, 217 bp, Nicotiana tabacum
  misc_feature (4)..(4): N = G, C, A or T
  misc_feature (6)..(6): N = G, C, A or T
  misc_feature (15)..(15): N = G, C, A or T
  misc_feature (35)..(35): N = G, C, A or T
  misc_feature (56)..(56): N = G, C, A or T
  misc_feature (66)..(66): N = G, C, A or T
  misc_feature (98)..(98): N = G, C, A or T
  misc_feature (109)..(109): N = G, C, A or T
  misc_feature (139)..(139): N = G, C, A or T
  misc_feature (174)..(174): N = G, C, A or T
  misc_feature (179)..(179): N = G, C, A or T
  misc_feature (188)..(188): N = G, C, A or T
cgtngnccaactcanggctgaacaagtgatgaagngcccttcacgggttcctctgnaagaaccagnggcagttggtggtaaacatatgtcaaagtctncaagtatgaanggaatcatcacccctgcgccaaggttgagnttctccccttccttacctatcacccgagcatcggnttctncctcaaagncttctacgcagccctcgtctcgtccttca

SEQ ID NO: 179 - DNA, 81 bp, Nicotiana tabacum
  misc_feature (3)..(3): N = G, C, A or T
cgngtggaaatcgcccgtaactgacctgacatttccggagtttactgaggaagagtcaacgtgggacatgtgttcggataa

SEQ ID NO: 180 - DNA, 301 bp, Nicotiana tabacum
  misc_feature (1)..(1): N = G, C, A or T
  misc_feature (12)..(12): N = G, C, A or T
  misc_feature (140)..(140): N = G, C, A or T
  misc_feature (142)..(142): N = G, C, A or T
  misc_feature (178)..(178): N = G, C, A or T
  misc_feature (211)..(211): N = G, C, A or T
ntactggtactngagcgggggaatttttcgattatctgctgggctgattccattcagtaatgctttccgggaatgtataataaaatgccgagttggtgactgagaagaaaccttgtaaataaaatcacatagttcgttgnangagtcgtggtcatcaactccaattctgcatttcacnctcactggaacatttgtatttgcagcaattacncacatggcctcagcaacaaactttggatcaagcatgagtcgcacaccaaaacacccatgtccagctactttagggctaggacatccgcaa

SEQ ID NO: 181 - DNA, 84 bp, Nicotiana tabacum
  misc_feature (13)..(13): N = G, C, A or T
  misc_feature (22)..(22): N = G, C, A or T
  misc_feature (24)..(24): N = G, C, A or T
  misc_feature (38)..(38): N = G, C, A or T
agtgcccattttntcaggttgnanaatgagcaccttgnaataacgtcgggaaatatcgtgccttcaagtccgtaccattgcctt

SEQ ID NO: 182 - DNA, 254 bp, Nicotiana tabacum
  misc_feature (32)..(32): N = G, C, A or T
attcccggtttaacctccagtatcctgttttnctgatgaagacatgctagaggtcccaacatatgctttagaaggctagaaacttgtgaagatagcagatggtcataattgtaaaacttgggtgtcatgaaaatatacgtatcacgacaatgactggtggctgcaaagttgaatgtgttgctgatggtgactgtatagttagttgaatgtgttgctgatggtggcaagagagggtttatacttttggttgtgtt

SEQ ID NO: 183 - DNA, 83 bp, Nicotiana tabacum
  misc_feature (3)..(5): N = G, C, A or T
  misc_feature (7)..(7): N = G, C, A or T
  misc_feature (20)..(20): N = G, C, A or T
  misc_feature (23)..(23): N = G, C, A or T
  misc_feature (28)..(28): N = G, C, A or T
  misc_feature (37)..(37): N = G, C, A or T
  misc_feature (67)..(67): N = G, C, A or T
  misc_feature (75)..(75): N = G, C, A or T
  misc_feature (80)..(80): N = G, C, A or T
  misc_feature (82)..(82): N = G, C, A or T
ccnnngnaaatcccatacanatnttgcnctaaacttnctcaccgaaacaaacctggatgttctctgngaactggntgatntnc

SEQ ID NO: 184 - DNA, 95 bp, Nicotiana tabacum
  misc_feature (2)..(2): N = G, C, A or T
  misc_feature (12)..(12): N = G, C, A or T
  misc_feature (34)..(34): N = G, C, A or T
  misc_feature (78)..(78): N = G, C, A or T
cntttggaaccnccctcaagctgaaaaagaggangggattatacctcttaccgacacattgccaattatgccacaggntttatgtcaccatgccc

SEQ ID NO: 185 - DNA, 159 bp, Nicotiana tabacum
  misc_feature (1)..(1): N = G, C, A or T
  misc_feature (15)..(15): N = G, C, A or T
  misc_feature (27)..(27): N = G, C, A or T
  misc_feature (33)..(33): N = G, C, A or T
  misc_feature (35)..(35): N = G, C, A or T
  misc_feature (44)..(45): N = G, C, A or T
  misc_feature (47)..(47): N = G, C, A or T
  misc_feature (51)..(51): N = G, C, A or T
  misc_feature (54)..(54): N = G, C, A or T
  misc_feature (57)..(57): N = G, C, A or T
  misc_feature (62)..(62): N = G, C, A or T
  misc_feature (65)..(66): N = G, C, A or T
  misc_feature (78)..(78): N = G, C, A or T
  misc_feature (81)..(81): N = G, C, A or T
  misc_feature (85)..(85): N = G, C, A or T
  misc_feature (87)..(87): N = G, C, A or T
  misc_feature (93)..(93): N = G, C, A or T
  misc_feature (102)..(102): N = G, C, A or T
  misc_feature (104)..(104): N = G, C, A or T
  misc_feature (110)..(110): N = G, C, A or T
  misc_feature (128)..(128): N = G, C, A or T
  misc_feature (136)..(136): N = G, C, A or T
nagcgcttggtcttncctcactgcttntggtgntnaatcttggnntntgtnccnagncgtcntcnntaacatgaagcntanggtnanaaaggnagaaaagtntnctgctngaagggctatcttgcccntgcttcangctgaagaggatgaaagattcgt

SEQ ID NO: 186 - DNA, 157 bp, Nicotiana tabacum
  misc_feature (8)..(9): N = G, C, A or T
  misc_feature (47)..(47): N = G, C, A or T
  misc_feature (109)..(109): N = G, C, A or T
  misc_feature (114)..(114): N = G, C, A or T
  misc_feature (127)..(127): N = G, C, A or T
  misc_feature (129)..(129): N = G, C, A or T
  misc_feature (133)..(133): N = G, C, A or T
  misc_feature (142)..(142): N = G, C, A or T
gcttaganntcttgaaggtgacctgataatggaatctggccaattgnctacaacacctaggtatgatgtgggaagccaaagtggaaggattttgtctgatcactacatncagcntcataggtacagngnctcnatactaaangatgggttggaggga

SEQ ID NO: 187 - DNA, 81 bp, Nicotiana tabacum
  misc_feature (12)..(12): N = G, C, A or T
  misc_feature (28)..(28): N = G, C, A or T
  misc_feature (77)..(77): N = G, C, A or T
cttggatggtcnaccagattgaagaacncgagaaaaagctgttttctcatccacttcataagtcacaaaatgaacancagc

SEQ ID NO: 188 - DNA, 151 bp, Nicotiana tabacum
  misc_feature (3)..(3): N = G, C, A or T
  misc_feature (15)..(15): N = G, C, A or T
  misc_feature (17)..(17): N = G, C, A or T
  misc_feature (20)..(20): N = G, C, A or T
  misc_feature (21)..(21): N = G, C, A or T
  misc_feature (23)..(23): N = G, C, A or T
  misc_feature (31)..(31): N = G, C, A or T
  misc_feature (45)..(45): N = G, C, A or T
  misc_feature (48)..(49): N = G, C, A or T
  misc_feature (56)..(57): N = G, C, A or T
  misc_feature (68)..(69): N = G, C, A or T
  misc_feature (74)..(74): N = G, C, A or T
  misc_feature (80)..(80): N = G, C, A or T
  misc_feature (83)..(83): N = G, C, A or T
  misc_feature (91)..(91): N = G, C, A or T
  misc_feature (97)..(97): N = G, C, A or T
  misc_feature (106)..(106): N = G, C, A or T
  misc_feature (123)..(123): N = G, C, A or T
  misc_feature (128)..(128): N = G, C, A or T
ganagcccatgctgntntannanaagctgcngaggctgacttggnggnnctgtacnnaggataccaanntgttnttgctnatncacgctanaagggngactattangcctaaggatattcagntggcnaggcgtattacgggagaaagggc

SEQ ID NO: 189 - DNA, 159 bp, Nicotiana tabacum
  misc_feature (12)..(12): N = G, C, A or T
  misc_feature (27)..(27): N = G, C, A or T
cgttagtacgcncatctgataatgacnttgagagtgcaaaatgcatgagcttgttgtcaaataatcatcatcatttcagtacaaggccaaaggctgattttacaaatcaggtcatccgcaaaatgagggacttaccagctgcaaagttatctcagttgc

SEQ ID NO: 190 - DNA, 223 bp, Nicotiana tabacum
  misc_feature (12)..(12): N = G, C, A or T
accttggaattncttactgaatgactaaatgacttgctcgaaggacgaggtggtggcattagagcacgggcagatattttgccccttcttgatttttcatcgctggacatgctagaagctgctttcactgatgtactagaagcttgttctcttgcacttttatcagtcaactcgtcatcagcatcatcacttgagcttccactttcaaagaagtcatcgctgc

SEQ ID NO: 191 - DNA, 393 bp, Nicotiana tabacum
  misc_feature (6)..(6): N = G, C, A or T
  misc_feature (19)..(20): N = G, C, A or T
  misc_feature (32)..(32): N = G, C, A or T
  misc_feature (36)..(36): N = G, C, A or T
  misc_feature (51)..(51): N = G, C, A or T
  misc_feature (190)..(190): N = G, C, A or T
  misc_feature (199)..(199): N = G, C, A or T
  misc_feature (327)..(327): N = G, C, A or T
acaccnatttcaactaccnngagctgacagcntacncaatacaccgcagangctttttgcttactccaaagttgctccctaatctggaatacagcgaagcatgcagcattttgactgtaatgaatggtccttggattgagcagccatccaaagcttggagtggtggagaatgctggaggtctgtgatggnactaatggnggaacgttgtcgctgactagaagcagaaatactttaggttgattcgaacaggatttgtccataagaaaaatttgcttccttgttgatctgccattgcgctagttacaagctgaatcatggtcgctcanctatgttttttgaaaaatctgttattactggcccttgttctaaaataacataattcttttgtacgc

SEQ ID NO: 192 - DNA, 198 bp, Nicotiana tabacum
  misc_feature (7)..(8): N = G, C, A or T
  misc_feature (26)..(26): N = G, C, A or T
  misc_feature (28)..(28): N = G, C, A or T
  misc_feature (44)..(44): N = G, C, A or T
  misc_feature (73)..(73): N = G, C, A or T
  misc_feature (102)..(102): N = G, C, A or T
  misc_feature (112)..(112): N = G, C, A or T
  misc_feature (188)..(188): N = G, C, A or T
cgtttgnntcacgttctaatgtacgntnacttcattggaaacantcctacacattcagagacgaaactggcanactcttacctctatgacaaagctacatgnattcttgctnggaaactcttcctcccggaaacagatttcaatctggaccatctagctgcaaatcctcttgtaccagaaaaagatanactcttggac

SEQ ID NO: 193 - DNA, 191 bp, Nicotiana tabacum
  misc_feature (21)..(21): N = G, C, A or T
  misc_feature (76)..(76): N = G, C, A or T
  misc_feature (107)..(107): N = G, C, A or T
ccttggaattgcctccattgntgcgggccaggcgttcctgatgtatggaacgagttgctatttcaatttttgtganaagaacaggtgcactttgtaagtaatctttncactatcattggagaaaagaaaagttcacaccttgaacgtaatgtacatctcgaatgagcacgcccatgtttctactgttagta

SEQ ID NO: 194 - DNA, 81 bp, Nicotiana tabacum
  misc_feature (20)..(20): N = G, C, A or T
  misc_feature (70)..(70): N = G, C, A or T
cctttctagtttgcatcacntgcatttgactttggggactcaacacaggggttgggtccgtctaggacangtgtacccaaa

SEQ ID NO: 195 - DNA, 73 bp, Nicotiana tabacum
  misc_feature (5)..(6): N = G, C, A or T
ccttnnacattttctggttagcctctggtttgtttttgatgtttttagcaccggtgtgcataatccagtgtgc

SEQ ID NO: 196 - DNA, 316 bp, Nicotiana tabacum
  misc_feature (3)..(4): N = G, C, A or T
  misc_feature (6)..(6): N = G, C, A or T
  misc_feature (11)..(11): N = G, C, A or T
  misc_feature (16)..(16): N = G, C, A or T
  misc_feature (17)..(17): N = G, C, A or T
  misc_feature (40)..(41): N = G, C, A or T
  misc_feature (44)..(45): N = G, C, A or T
  misc_feature (54)..(54): N = G, C, A or T
  misc_feature (66)..(66): N = G, C, A or T
  misc_feature (75)..(75): N = G, C, A or T
  misc_feature (114)..(114): N = G, C, A or T
  misc_feature (165)..(165): N = G, C, A or T
  misc_feature (173)..(173): N = G, C, A or T
  misc_feature (175)..(175): N = G, C, A or T
  misc_feature (191)..(191): N = G, C, A or T
  misc_feature (201)..(201): N = G, C, A or T
  misc_feature (210)..(210): N = G, C, A or T
  misc_feature (212)..(212): N = G, C, A or T
  misc_feature (248)..(248): N = G, C, A or T
  misc_feature (292)..(292): N = G, C, A or T
  misc_feature (304)..(304): N = G, C, A or T
gtnngngagcntggcnnaggatgcagactaccaaagctcnnaannaagcttctntgaacactctcntaataggtnagatgtaatggtctttcagaatggccaacacagcaatantgccttgagtgtcccaaatcactgatgccatgatgtgggctcctagactgncctgactntngctttgactgtgccantgccacctcntggtagccntnagttttcatgatgctttgccttggagatcatattgncgaagccatgttccaactgccgcttacaatttgtcagagggatncgtcaggatcgngaaccctcctgt

SEQ ID NO: 197 - DNA, 190 bp, Nicotiana tabacum
  misc_feature (7)..(7): N = G, C, A or T
  misc_feature (10)..(10): N = G, C, A or T
  misc_feature (18)..(18): N = G, C, A or T
  misc_feature (28)..(28): N = G, C, A or T
  misc_feature (29)..(29): N = G, C, A or T
  misc_feature (40)..(40): N = G, C, A or T
  misc_feature (46)..(46): N = G, C, A or T
  misc_feature (49)..(49): N = G, C, A or T
  misc_feature (56)..(56): N = G, C, A or T
  misc_feature (60)..(60): N = G, C, A or T
  misc_feature (65)..(65): N = G, C, A or T
  misc_feature (67)..(68): N = G, C, A or T
  misc_feature (73)..(73): N = G, C, A or T
  misc_feature (75)..(75): N = G, C, A or T
  misc_feature (77)..(78): N = G, C, A or T
  misc_feature (81)..(81): N = G, C, A or T
  misc_feature (83)..(84): N = G, C, A or T
  misc_feature (85)..(85): N = G, C, A or T
  misc_feature (100)..(100): N = G, C, A or T
  misc_feature (116)..(116): N = G, C, A or T
  misc_feature (123)..(124): N = G, C, A or T
  misc_feature (126)..(126): N = G, C, A or T
  misc_feature (132)..(132): N = G, C, A or T
  misc_feature (139)..(139): N = G, C, A or T
  misc_feature (141)..(142): N = G, C, A or T
  misc_feature (145)..(145): N = G, C, A or T
  misc_feature (151)..(151): N = G, C, A or T
  misc_feature (159)..(159): N = G, C, A or T
  misc_feature (163)..(163): N = G, C, A or T
  misc_feature (166)..(166): N = G, C, A or T
  misc_feature (168)..(169): N = G, C, A or T
  misc_feature (182)..(182): N = G, C, A or T
  misc_feature (184)..(184): N = G, C, A or T
tgcgganccngggcatgncagcacgccnnaggaccatgcnagcagnatnactgctncagnagatngnnatgangngnntgncnnnatgtttgttagtccngcgtgtcttttaatanatcatcnntnaccgcntaggttngnncancactgncgaggctnttangtnanntaagagtctgtcntngtctag

SEQ ID NO: 198 - DNA, 253 bp, Nicotiana tabacum
agtgcaatgagtatagctattgaggctattgaatctggcgctgtcaatgctgcttctgtccttgagcaaattgagctccaaatagctcaagctaaagaggaagcttttagcagaaaagacattctagacaaagtcgagaaatggattgctgcttgtgaggaggagtgttggcttgaggagtataacagggatgaaaatcgctataatgctggacgaggcacccaccttaccctgaagcgtgctgagaaagctc

SEQ ID NO: 199 - DNA, 375 bp, Nicotiana tabacum
  misc_feature (11)..(11): N = G, C, A or T
  misc_feature (20)..(20): N = G, C, A or T
caaagtacganagcgatggntctatctctcagctgcaggcaatgccaagtcgccttgacttcaccactgaattcctctctctagctgctcatgaagctattgtctgtcgttgtcatccagttactgttgcttctctgtcacttctcttgaacttctatcccacagggaaacagatgccaacaactgaggttgtagttttcaggactttagtcacgactctatctcagggtcctcagaatgattctgatatcctaaagcaaatgaaacgagctcacactcggctatctgagctaggtgctgacaaattttttgggaaaggtgagattgggagacgggaaaggaactggttttcagtgaatgcatggaattccggtg

SEQ ID NO: 200 - DNA, 516 bp, Nicotiana tabacum
  misc_feature (7)..(7): N = G, C, A or T
  misc_feature (13)..(13): N = G, C, A or T
  misc_feature (19)..(19): N = G, C, A or T
  misc_feature (22)..(22): N = G, C, A or T
  misc_feature (25)..(25): N = G, C, A or T
  misc_feature (26)..(26): N = G, C, A or T
  misc_feature (36)..(36): N = G, C, A or T
  misc_feature (37)..(37): N = G, C, A or T
  misc_feature (41)..(41): N = G, C, A or T
  misc_feature (44)..(44): N = G, C, A or T
  misc_feature (194)..(194): N = G, C, A or T
  misc_feature (239)..(239): N = G, C, A or T
  misc_feature (422)..(422): N = G, C, A or T
ctgggcngacatngcctantgnggnntttctgaggnntccnatngacatgattgtggggactccaggcagggttctacaacatattgaagagggaaacgtggtttatggtgacatcagatacttggtcttggatgaggctgataccatgtttgatcgcggttttggtcctgatatacgaaaatttcttgcaccnctgaaaaaccgtgcttcgaagcctggtgatgaaggatttcaaacngtgttggtgacagcaacaatgacaaaggcagttcaaaagctggttgacgaggagtttcaagggattcagcatttacgtacttctacattacataagaagattgcttctgctcgtcatgatttcatcaaactttcaggttctgagaacaagctggaggcgttgctacaggttcttgagccaagnttagcaaagggcaatagagtgatggtattctgtaacacgttgaattccagtcgtgctgtggatcactttctcagtgaaaaccaattttctactg

SEQ ID NO: 201 - DNA, 126 bp, Nicotiana tabacum
  misc_feature (4)..(5): N = G, C, A or T
  misc_feature (21)..(21): N = G, C, A or T
  misc_feature (33)..(33): N = G, C, A or T
  misc_feature (43)..(43): N = G, C, A or T
  misc_feature (86)..(86): N = G, C, A or T
  misc_feature (87)..(87): N = G, C, A or T
tttnncaacctttggtattgngctcactttttnctatggcagncttggcttcttggtggctggcaagaacggaaagaatggtcaanncttcatcaaccatgcaattgcttgaatctgtcagcatcg

SEQ ID NO: 202 - DNA, 172 bp, Nicotiana tabacum
  misc_feature (2)..(2): N = G, C, A or T
  misc_feature (72)..(72): N = G, C, A or T
angttggccaaggcacttgcgaaattctttggtgccaggctactgatagttgattctctcttattacctggnggatcaactgccaaagacattgactctgtaaaggaaagttctaaacctgagagagcaagtactttcgctaaacgtgctgctcaggtggctgcactacatc

SEQ ID NO: 203 - DNA, 238 bp, Nicotiana tabacum
cacttgctactctagcaactgaaggattggtttctgttcatggtgacgctgtgaagagaatatgatgagtctaaattaggagtgaggcattctcaaattcattgctcagggagcagaagttgatatgtggattgctactatttgcaagagcactttgcgggcatgttaggcaaagtcatgtttttttgttcctgatcagcattcttcactatctgccctttgaaacagttagccatac

SEQ ID NO: 204 - DNA, 263 bp, Nicotiana tabacum
  misc_feature (1)..(1): N = G, C, A or T
  misc_feature (8)..(8): N = G, C, A or T
  misc_feature (14)..(14): N = G, C, A or T
  misc_feature (29)..(29): N = G, C, A or T
  misc_feature (31)..(31): N = G, C, A or T
  misc_feature (35)..(35): N = G, C, A or T
  misc_feature (36)..(36): N = G, C, A or T
  misc_feature (38)..(38): N = G, C, A or T
  misc_feature (40)..(40): N = G, C, A or T
  misc_feature (49)..(49): N = G, C, A or T
  misc_feature (52)..(52): N = G, C, A or T
  misc_feature (56)..(56): N = G, C, A or T
  misc_feature (59)..(59): N = G, C, A or T
  misc_feature (61)..(61): N = G, C, A or T
  misc_feature (68)..(68): N = G, C, A or T
  misc_feature (86)..(86): N = G, C, A or T
  misc_feature (106)..(106): N = G, C, A or T
  misc_feature (134)..(134): N = G, C, A or T
  misc_feature (159)..(159): N = G, C, A or T
  misc_feature (180)..(180): N = G, C, A or T
  misc_feature (209)..(209): N = G, C, A or T
  misc_feature (213)..(213): N = G, C, A or T
  misc_feature (222)..(222): N = G, C, A or T
  misc_feature (236)..(236): N = G, C, A or T
ngaccgcngcgatnctagaatcagttgananttgnngntnggacatggnatntctngcncntgaagcntttttgtcatcgacgatnatgaatttctacatccggtncctccagaagacaaaagctcatgcagangtagatgagtatcactttttcaatncatatttctacaagaagctcnaagaggctgtactgagcaagaaaggaatngcanatgctttgntggaatatcaactnccaacagctacctgaaagcaaagtgcc

SEQ ID NO: 205 - DNA, 297 bp, Nicotiana tabacum
  misc_feature (10)..(10): N = G, C, A or T
  misc_feature (73)..(73): N = G, C, A or T
  misc_feature (87)..(87): N = G, C, A or T
tcaaccaagntgttcctattggttcaagcttcttcttcaatcaacttgcctttgcattttcttccaaagaggnattttaggtacagnaaaaagatagtgcctttgaaattgcggtttagttgtaaaagcaaaaatcttgaaagagaagcatgtgctgatgatactcaaactgctaaagcaatcacatcgcatagttctaaactcgaagacgttatctggtttcagtgtcggcatattatcaagggcttggcttccaggatttctccaactgaagagtgaggatggcttccttcttcc

SEQ ID NO: 206 - DNA, 169 bp, Nicotiana tabacum
  misc_feature (1)..(1): N = G, C, A or T
ncaatgacagtgcttgctccagcttcccttacttccccaccttctgtggtgtcattgagcacttcaccaacatcaccaatgagtcccttcattggttcttctgatttcacagagagagtgagtatcgataagcaaataactgctgctcagagcaatagcttggtatcag

SEQ ID NO: 207 - DNA, 189 bp, Nicotiana tabacum
  misc_feature (16)..(16): N = G, C, A or T
  misc_feature (19)..(19): N = G, C, A or T
  misc_feature (27)..(27): N = G, C, A or T
  misc_feature (32)..(32): N = G, C, A or T
  misc_feature (34)..(34): N = G, C, A or T
  misc_feature (39)..(39): N = G, C, A or T
  misc_feature (44)..(44): N = G, C, A or T
  misc_feature (52)..(52): N = G, C, A or T
  misc_feature (61)..(61): N = G, C, A or T
  misc_feature (71)..(71): N = G, C, A or T
  misc_feature (84)..(84): N = G, C, A or T
  misc_feature (106)..(106): N = G, C, A or T
  misc_feature (122)..(122): N = G, C, A or T
  misc_feature (140)..(140): N = G, C, A or T
  misc_feature (146)..(146): N = G, C, A or T
  misc_feature (147)..(148): N = G, C, A or T
  misc_feature (150)..(150): N = G, C, A or T
  misc_feature (152)..(152): N = G, C, A or T
  misc_feature (160)..(160): N = G, C, A or T
  misc_feature (167)..(167): N = G, C, A or T
ttgcttccttgatagngcntgacagangcctnangaccntccantcaggatnactcattcnggaggttgcntgaggagattttntttatgtttttagactgctgcncttttttatatcatcntttaccgactagctttgnacagannngncnaggctttnagggganggtagagtttgtcatagtctag

SEQ ID NO: 208 - DNA, 118 bp, Nicotiana tabacum
  misc_feature (24)..(24): N = G, C, A or T
  misc_feature (98)..(98): N = G, C, A or T
agatgataaaagtctggacgaggntggggacccgacgctgcccatcttagaggacggcgtaccaactgagaataagaatataactaactcacaccttnctctgcaaattccagacctc

SEQ ID NO: 209 - DNA, 164 bp, Nicotiana tabacum
  misc_feature (2)..(5): N = G, C, A or T
  misc_feature (11)..(12): N = G, C, A or T
  misc_feature (23)..(24): N = G, C, A or T
  misc_feature (29)..(29): N = G, C, A or T
  misc_feature (41)..(41): N = G, C, A or T
  misc_feature (61)..(61): N = G, C, A or T
  misc_feature (63)..(63): N = G, C, A or T
  misc_feature (65)..(65): N = G, C, A or T
  misc_feature (93)..(93): N = G, C, A or T
cnnnncactcnngaaatactttnncgccnggctactgatanttgattctctcttattaccngntntttcaactgccaaagacattgactctgnaaaggaaagttctaaacctgagagagcaagtactttcgctaaacgtgctgctcaggtggctgcactacatc

SEQ ID NO: 210 - DNA, 180 bp, Nicotiana tabacum
  misc_feature (7)..(7): N = G, C, A or T
  misc_feature (24)..(24): N = G, C, A or T
  misc_feature (111)..(111): N = G, C, A or T
  misc_feature (173)..(173): N = G, C, A or T
ttttganggccttaagctacatcngaggaatgaagagtattatcggttgatttcaccacacatataatgcgcactggacctacataatcctggaaactgtaatgtcaaggnggttgaagcggaatcttcacaatcattcaaaggaagaatcacaatgctgcctatcagttttnatgatgc

SEQ ID NO: 211 - DNA, 264 bp, Nicotiana tabacum
  misc_feature (6)..(7): N = G, C, A or T
  misc_feature (34)..(34): N = G, C, A or T
  misc_feature (39)..(39): N = G, C, A or T
  misc_feature (46)..(46): N = G, C, A or T
  misc_feature (52)..(52): N = G, C, A or T
cgcgtnngtcttaacggctggtcggctggcatancggtnatacggnttattntgccagtaagtttggcctcaaaggactggcagaagcattgcagcaggaggttattggcgaaaatattcacgtatcactaatatttcccccggacactgaaactcctggatttgctgaagagaacaaaagaaggccacgggtgactagtataatagcagcctcttctggtgccatgaaagctgacgaagttgccaagatagctttgaatggca

SEQ ID NO: 212 - DNA, 91 bp, Nicotiana tabacum
  misc_feature (5)..(5): N = G, C, A or T
  misc_feature (8)..(8): N = G, C, A or T
  misc_feature (67)..(67): N = G, C, A or T
ggcanttnttttctattacttcccagccttgggtggaatggagtatgtcttacatcacgggctctcnatgtttgcaattgttcaatccctt

SEQ ID NO: 213 - DNA, 124 bp, Nicotiana tabacum
  misc_feature (2)..(2): N = G, C, A or T
  misc_feature (12)..(12): N = G, C, A or T
  misc_feature (22)..(23): N = G, C, A or T
gntggaatgccnaaagaagcanncgacccctgtcctatcagtgtctattcttcagtttgctagatgagaaaagatcatattttgtgcaaagcaatcaaccaaacttagttgctgttgctgtagt

SEQ ID NO: 214 - DNA, 92 bp, Nicotiana tabacum
  misc_feature (43)..(43): N = G, C, A or T
  misc_feature (57)..(57): N = G, C, A or T
  misc_feature (65)..(65): N = G, C, A or T
  misc_feature (73)..(73): N = G, C, A or T
  misc_feature (82)..(82): N = G, C, A or T
  misc_feature (90)..(90): N = G, C, A or T
cttcttatcttctacaaattggctcaatatttttagtcttacnattttatctttttntaattttnataaaganatataattnatttgagnga

SEQ ID NO: 215 - DNA, 184 bp, Nicotiana tabacum
  misc_feature (4)..(4): N = G, C, A or T
  misc_feature (15)..(15): N = G, C, A or T
  misc_feature (134)..(134): N = G, C, A or T
ttcngttactggggntgatgatttgacaaacccgaagtggtatgtggtgtggtctgcaaatatgaacactcacattcttcccgaatgcgtagttagctacaaatatggacgtcatatgtcaggtcaagcaaatngtgcttcatccatgaagtgggctcctcatgcttcaaatgcaatgggtaca

SEQ ID NO: 216 - DNA, 403 bp, Nicotiana tabacum
  misc_feature (2)..(2): N = G, C, A or T
  misc_feature (170)..(170): N = G, C, A or T
  misc_feature (351)..(351): N = G, C, A or T
  misc_feature (357)..(357): N = G, C, A or T
gnagcaattatccttccttttctcttttcaattatttttcgtaagggtagttgctgataggtttggaggtccaatggcgattggcatgaagcagatgtccataataatagcaacccttggtgttttatcctttgtatttggagttattgctgaaaacaagaagcctgcanctgggactgcaataccaggaaaaggcgttgttatttgtaaatacaagtctgaccctactgttgccttgggctatttgtcttttgctcttcttgttgcatcttctgtggccggtttcctgtcgttattttatccgtatcaagggaagtcaatcccacaagctgctttgctcaaaaacactanttttgntgtgttcctcaacatcgcattgggcacaactggtttagcagcagca

SEQ ID NO: 217 - DNA, 110 bp, Nicotiana tabacum
aatgaatatctccatgactagaaaattgtagacatgacacattcttttcttctgctttgcaggctcagtgaagctttcatttggctagattcgtggattttgttatcagt

SEQ ID NO: 218 - DNA, 119 bp, Nicotiana tabacum
caaagaagaagatgggtcgtcatcatcatcatcataatgaaggaaatagaccatatgatgatccattcttggcatgttgttgttgtccttgttttgtagtttcttctactttctctgtg

SEQ ID NO: 219 - DNA, 139 bp, Nicotiana tabacum
  misc_feature (2)..(2): N = G, C, A or T
  misc_feature (103)..(103): N = G, C, A or T
gnaggttcatatctcaaggtcaaagaagaagatgggtcgtcatcatcatcatcataatgaaggaaatagaccatatgatgatccattcttggcatgttgttgntgtccttgttttgtagtttcttctactttctctgtg

SEQ ID NO: 220 - DNA, 232 bp, Nicotiana tabacum
  misc_feature (33)..(33): N = G, C, A or T
  misc_feature (88)..(88): N = G, C, A or T
  misc_feature (181)..(181): N = G, C, A or T
ggaaataccccacgcttcagcagatcaaggaanccttcctgaatcagctacttctgctgcacatgaggcatctattcgcgaatttgcngaggctgtccgtgcttatcgagctattttccatgattcagaacagcaactctctagacttgcacaaaatgtacctaaaatgcatttcgaagcngcccagcagcacatcaagaaacgacttgcttcttccaatcttgttgccatg

SEQ ID NO: 221 - DNA, 185 bp, Nicotiana tabacum
  misc_feature (17)..(17): N = G, C, A or T
  misc_feature (163)..(163): N = G, C, A or T
gaaaagcaaaaataagncgacatggggtttatttggaagaagaagattgggactttgaataataagaagcgtaagtgggaggagaatagatcacggcggcagccatagctccagggaacactacatatttagctatcagcgccaccttcctcaccaatggctntcccttcatcaacgccatttgc

SEQ ID NO: 222 - DNA, 233 bp, Nicotiana tabacum
  misc_feature (1)..(1): N = G, C, A or T
  misc_feature (4)..(5): N = G, C, A or T
  misc_feature (34)..(34): N = G, C, A or T
nctnnaaaggccactcaagttcctgatataaaangacatagtatttgcacatcacctttgcacatccttccattttcttcatatcaactctagatcactcataatatccgatgtaaatgtcatgcaaatagttattgtactatattgtgtaaggaataaggacaagaaaaaagtctgtacatgttcagtacagacgcaatttttttttccaatatttccaatccttggttgcc

SEQ ID NO: 223 - DNA, 272 bp, Nicotiana tabacum
  misc_feature (7)..(7): N = G, C, A or T
  misc_feature (16)..(16): N = G, C, A or T
  misc_feature (34)..(34): N = G, C, A or T
  misc_feature (44)..(44): N = G, C, A or T
  misc_feature (92)..(92): N = G, C, A or T
  misc_feature (146)..(146): N = G, C, A or T
  misc_feature (157)..(157): N = G, C, A or T
tttgcanacagtcccntactttcccgactacttncaataggatnctgaagatgcctttgattcatcttctgacattctagcctatccgtggncaatcaacacaaagtattataatgctgatggttctatttggatggcccatcttnatgaggacttntccattggagctttgccagcatttgaccaccttattgcattggtgttggtcttcgatattagtgatctctcatcttttgctgcgctgaaagattgggtttctcgcaccgacatcc

SEQ ID NO: 224 - DNA, 316 bp, Nicotiana tabacum
acccaaatcctcctcaacctgaacaatgttgaagagagccaacctctaccaggttgtagtttggttgcaaatgaaagaactcctatgaagctcctgtctgaaagtgaagtaatgcttgaaacacctgctcagcccacaccaaagagatcggtgccaattaccgaaaataagtacaagagtatgacatgccaaaactctgttgtttccaatctaattgtcaaaaggtcattggatttttccaccttgggtggtgaagagatatcttcagatttgagttctggcagtatagagcatcatgaagatgtagataatgccc

SEQ ID NO: 225 - DNA, 345 bp, Nicotiana tabacum
  misc_feature (11)..(11): N = G, C, A or T
  misc_feature (17)..(17): N = G, C, A or T
  misc_feature (26)..(26): N = G, C, A or T
  misc_feature (42)..(42): N = G, C, A or T
  misc_feature (54)..(54): N = G, C, A or T
  misc_feature (65)..(65): N = G, C, A or T
  misc_feature (70)..(70): N = G, C, A or T
  misc_feature (90)..(90): N = G, C, A or T
  misc_feature (106)..(106): N = G, C, A or T
  misc_feature (112)..(112): N = G, C, A or T
  misc_feature (130)..(130): N = G, C, A or T
  misc_feature (137)..(137): N = G, C, A or T
  misc_feature (210)..(210): N = G, C, A or T
  misc_feature (225)..(225): N = G, C, A or T
  misc_feature (247)..(247): N = G, C, A or T
  misc_feature (250)..(250): N = G, C, A or T
  misc_feature (256)..(256): N = G, C, A or T
  misc_feature (271)..(271): N = G, C, A or T
  misc_feature (275)..(275): N = G, C, A or T
  misc_feature (277)..(277): N = G, C, A or T
  misc_feature (286)..(286): N = G, C, A or T
  misc_feature (292)..(292): N = G, C, A or T
  misc_feature (296)..(296): N = G, C, A or T
  misc_feature (317)..(317): N = G, C, A or T
taccggatgantttgtngatgatgancattcccagtttttgnttgcacctgctnttttggccagntttcnattgagagagaggagacgcnaaaagcatgctgctgntttagngaaacaagatgatgaggnaaccgtnaagcttgaaaatgctgcccttgaacgctctaagtcagttgactctgctgagctggggaagtatagcatatggnggaaagagaatgaanatgagaatactgattcaaaggnacncttgangcgggaccaaatggntacngnaaggctgtntataancatngcaacaatgaagaaaaagatnggcttggctcaagagttagagaatcggc

SEQ ID NO: 226 - DNA, 456 bp, Nicotiana tabacum
  misc_feature (9)..(9): N = G, C, A or T
  misc_feature (18)..(18): N = G, C, A or T
  misc_feature (70)..(72): N = G, C, A or T
tttcttgcntacaggatntcaaggcattgttcccctctgatagaaatcccttttatgctggttttggaannngagacaccgacaagctcagctacctcaaggttggaatacctgaaggaaaaatcttcaccatcgatccaaagggtcaaattcttatgaaccaccacatagatacaaaatcatacacctacatacatggttgcgtcgatgacatgtttccacccttgtcctcacgtgagcagatttgttatggacaaagtgttactattactaagaggaggtattttcgccgttgatgggtaaatgactggagagtgatgctactgatggattcatcgttgcgaatgacacacatactggaattgtgatgacctgcatttgaagaaaattctgtctctgaacctttagtaggggatatggtctctgtataactggttttgtcaagaaatgtccacc

SEQ ID NO: 227 - DNA, 76 bp, Nicotiana tabacum
  misc_feature (7)..(7): N = G, C, A or T
  misc_feature (53)..(53): N = G, C, A or T
  misc_feature (55)..(55): N = G, C, A or T
  misc_feature (59)..(59): N = G, C, A or T
  misc_feature (66)..(67): N = G, C, A or T
  misc_feature (70)..(70): N = G, C, A or T
  misc_feature (72)..(72): N = G, C, A or T
tatcagncgaatctaattttgtacccggtggattgttatgtggtcctcaatgntnaagnaatatgnncgntnttgt

SEQ ID NO: 228 - DNA, 68 bp, Nicotiana tabacum
ttatggctttcactccaagaaaccctcgtgctggaaagccacctgatcattacatagaatacatgcgc

SEQ ID NO: 229 - DNA, 136 bp, Nicotiana tabacum
  misc_feature (14)..(14): N = G, C, A or T
  misc_feature (47)..(47): N = G, C, A or T
  misc_feature (56)..(56): N = G, C, A or T
  misc_feature (63)..(63): N = G, C, A or T
  misc_feature (64)..(64): N = G, C, A or T
  misc_feature (81)..(81): N = G, C, A or T
  misc_feature (93)..(94): N = G, C, A or T
  misc_feature (120)..(120): N = G, C, A or T
  misc_feature (132)..(132): N = G, C, A or T
ctcctatacctganaggactctcactttggagcctcctctaggtatntaattccgncctttgnngggagactgacatcggntacatgcagcgnngcttcaactgtaaatattccaccttnatggccttgccntcgt

SEQ ID NO: 230 - DNA, 254 bp, Nicotiana tabacum
  misc_feature (13)..(13): N = G, C, A or T
  misc_feature (142)..(142): N = G, C, A or T
  misc_feature (150)..(150): N = G, C, A or T
  misc_feature (154)..(154): N = G, C, A or T
  misc_feature (158)..(158): N = G, C, A or T
  misc_feature (160)..(160): N = G, C, A or T
  misc_feature (165)..(166): N = G, C, A or T
  misc_feature (168)..(168): N = G, C, A or T
  misc_feature (175)..(175): N = G, C, A or T
  misc_feature (177)..(177): N = G, C, A or T
  misc_feature (180)..(180): N = G, C, A or T
  misc_feature (186)..(186): N = G, C, A or T
cacccagaaaatnatctataaagtattatgatccaggacgagctgactaaactagctgatgaggaagatgacgaggaagaggaaggcgatgctgagaaggatgtaaaaaagccttctggcaaaggtgtgaaggcctgaaaanacatgggnagantgtnancacannanaggcccncnacnctatcnatcaatatccaacctttctcttcctcgtgaatttgtgccttgtgagttcaaccagctgtaatctattc

SEQ ID NO: 231 - DNA, 204 bp, Nicotiana tabacum
  misc_feature (3)..(4): N = G, C, A or T
  misc_feature (7)..(7): N = G, C, A or T
  misc_feature (10)..(11): N = G, C, A or T
  misc_feature (15)..(15): N = G, C, A or T
  misc_feature (20)..(20): N = G, C, A or T
  misc_feature (24)..(24): N = G, C, A or T
  misc_feature (25)..(25): N = G, C, A or T
  misc_feature (52)..(52): N = G, C, A or T
  misc_feature (66)..(66): N = G, C, A or T
  misc_feature (84)..(84): N = G, C, A or T
  misc_feature (92)..(92): N = G, C, A or T
  misc_feature (120)..(120): N = G, C, A or T
  misc_feature (130)..(130): N = G, C, A or T
  misc_feature (168)..(168): N = G, C, A or T
  misc_feature (171)..(171): N = G, C, A or T
gannccnttnncttnctaantaanngcaaaaataagcgacatggggtttatntggaagaagaagantgggactttgaataatangaagcgtnagtgggaggagaatagatcacggcggcngccatagctncagggaacactacatatttagctatcagcgccaccttnctnaccaatggctctcccttcatcaacgccatttgc

SEQ ID NO: 232 - DNA, 364 bp, Nicotiana tabacum
  misc_feature (8)..(8): N = G, C, A or T
  misc_feature (16)..(16): N = G, C, A or T
  misc_feature (19)..(19): N = G, C, A or T
  misc_feature (145)..(145): N = G, C, A or T
  misc_feature (156)..(156): N = G, C, A or T
  misc_feature (177)..(177): N = G, C, A or T
  misc_feature (192)..(192): N = G, C, A or T
  misc_feature (211)..(211): N = G, C, A or T
  misc_feature (228)..(228): N = G, C, A or T
  misc_feature (229)..(229): N = G, C, A or T
  misc_feature (231)..(231): N = G, C, A or T
  misc_feature (235)..(235): N = G, C, A or T
  misc_feature (236)..(236): N = G, C, A or T
  misc_feature (237)..(237): N = G, C, A or T
  misc_feature (239)..(239): N = G, C, A or T
  misc_feature (245)..(245): N = G, C, A or T
  misc_feature (252)..(252): N = G, C, A or T
  misc_feature (255)..(256): N = G, C, A or T
  misc_feature (258)..(258): N = G, C, A or T
  misc_feature (279)..(279): N = G, C, A or T
  misc_feature (362)..(362): N = G, C, A or T
gccttgantttgcgcnccnaacaggatgatcttgtagatgatgatcattcccagtttttggatgcacctgcttttttggccagaaggcaattgagagagaggagacgcgaaaagcatgctgctgctttagtgaaacaagatgatnaggtaaccgtnaagcttgaaaatgctgccctngaacgctctaactangctggcttttttgtgctgnaccagaatcccttatgnngnacannnantgatantgagaantcnnantcaaaggtacgcttgatgcgngaccaaatggttacggcaaggctgtatataagcattgcaacaatgaagaaaaagattggcttggctcaagagttacagaatcngc

SEQ ID NO: 233 - DNA, 306 bp, Nicotiana tabacum
ttggacttgagtgcttgtagatggtgcctttgccgatacccacggcatccgcaatcatctcgacggtgacgctgtcttcaccctggtcgaggaacagcttgagtgcggtgtcgagaatttcctgctcgcggcggcgaaactcacggaccttgcggggttctttgtgcataagaaaaaggtctgcagaggtggatattgggagggtggcgtgccccaagccgtgcttgtcggaacgttttacccggtgcgcgggattatcccgactgaacggtcgttgggcaacgcctatatgaacaacctttgcac

SEQ ID NO: 234 - DNA, 303 bp, Nicotiana tabacum
tcaacctgaacaatgttgaagagagccaacctctaccaggttgtagtttggttgcaaatgaaagaactcctatgaagctcctgtctgaaagtgaagtaatgcttgaaacacctgctcagcccacaccaaagagatcggtgccaattaccgaaaataagtacaagagtatgacatgccaaaactctgttgtttccaatctaattgtcaaaaggtcattggatttttccaccttgggtggtgaagagatatcttcagatttgagttctggcagtatagagcatcatgaagatgtagataatgccc

SEQ ID NO: 235 - DNA, 259 bp, Nicotiana tabacum
tcatgtgcattttgactttggagactcaacacaggggttgggtctgtctaggacaggtgcacctgaaatgaaaagaccatcttgatgcatcctatgtgctacatgttgcatttattcaagggtaaaaaggtcatttggcggaccaatgatagttgagggcaagtgaaaaaatgaaaaaaatgaaaaaagggaaaaagagagggtgaagtgtgaggataaagcgagcggggcctaattaggttatctgttacatttttgt

SEQ ID NO: 236 - DNA, 239 bp, Nicotiana tabacum
  misc_feature (179)..(179): N = G, C, A or T
  misc_feature (226)..(226): N = G, C, A or T
tcacgtgcatctgactttggggactcaacacaggggttgggtccgtctaggacaggtgtacctaaaataacagaccatcttgatgcatcctatgtgctacatgttgcatttcttcaagggcaaaagggtcatttggcggaccaatgatagttgagggaaaatgaaaaagaaaagaaaangaggttgaagtgtaaagataaagcgagtggggcccgattatattttntgtcacattcttg

SEQ ID NO: 237 - DNA, 171 bp, Nicotiana tabacum
  misc_feature (6)..(6): N = G, C, A or T
  misc_feature (9)..(9): N = G, C, A or T
  misc_feature (14)..(14): N = G, C, A or T
  misc_feature (28)..(28): N = G, C, A or T
  misc_feature (40)..(40): N = G, C, A or T
  misc_feature (59)..(59): N = G, C, A or T
  misc_feature (69)..(69): N = G, C, A or T
  misc_feature (74)..(74): N = G, C, A or T
  misc_feature (87)..(87): N = G, C, A or T
agcagncanggatnaaatgggaaaaacntgtcaagcctanctctaccaccaaaagagantgaaagatcngactngagcacaccactngatacataggtatcaggcacatagaagattagttactgtttgccaaccgaagaaattctttcactactgatggcaagcatacca

SEQ ID NO: 238 - DNA, 206 bp, Nicotiana tabacum
  misc_feature (156)..(156): N = G, C, A or T
agaggtatccttctagtgtggattttgatactggggttgatgatttgacaaacccgaagtggtatgtggtgtggtctgcaaatatgaacactcacattcttcccgaatgcgtagttagctacaaatatggacgtcatatgtcaggtcaagcaaatngtgcttcatccatgaagtgggctcctcatgcttcaaatgcaatgggtaca

SEQ ID NO: 239 - DNA, 58 bp, Nicotiana tabacum
  misc_feature (4)..(4): N = G, C, A or T
  misc_feature (34)..(34): N = G, C, A or T
gagnggcaagtcctggcgctctatttccgagagnagaaaaaagaattttgtttttgct

SEQ ID NO: 240 - DNA, 139 bp, Nicotiana tabacum
  misc_feature (5)..(5): N = G, C, A or T
  misc_feature (11)..(11): N = G, C, A or T
  misc_feature (20)..(20): N = G, C, A or T
  misc_feature (33)..(34): N = G, C, A or T
  misc_feature (36)..(36): N = G, C, A or T
gggtncaggcntctggcaantcctcggtgtcanngntacacaactggagatggaaagaaagtttatgtcgccaaaaatgggcaggagttttctggtcaaagcgcatatagatgttacagaaaggagactggagctggtt

SEQ ID NO: 241 - DNA, 202 bp, Nicotiana tabacum
  misc_feature (14)..(15): N = G, C, A or T
  misc_feature (44)..(44): N = G, C, A or T
ggttctatctaaannatttaatgacttgcagctgaaggatggtntgtacactagcaaagctgaactgcggaaacgtatcaggaaactcaaaaatgggccaggaagaaatcacactgcaggtgggagggttgaaaagtctaaaggtttttctcccaatagctttgatcgtgtgctccttgatgctccttgctctgcattaggt

SEQ ID NO: 242 - DNA, 387 bp, Nicotiana tabacum
  misc_feature (3)..(3): N = G, C, A or T
  misc_feature (5)..(5): N = G, C, A or T
  misc_feature (24)..(24): N = G, C, A or T
  misc_feature (134)..(134): N = G, C, A or T
tanantacgaccgagaacatcctnatcaaatgctctcaagctgttcttcatcaaaaccttttttcgggttcatcttcagtaccattacaacaatctttgattgaagctgcgggtaatgttgtacaacgggcttngaactcggcccagcccgaacatcagcccaatgtggtaaaaaatccgaaaaaacgaaccagggcatcaaggagagcgccaactactgtccttactactgacaccacaaattttcgacaaatggttcaagaattcactggcatccctacagctccgtttactggttcagcctacactcgccgccttgatcttttttctacagctggctcagcgatgaggtcgggtcatttggatactcttgggccactttaccct

SEQ ID NO: 243 - DNA, 286 bp, Nicotiana tabacum
  misc_feature (26)..(26): N = G, C, A or T
aagacagggatggcagtgctgagagnagggcaaagattgagcaatggaatagggaaaaagaagaggcagaatctgctaaatacaataattttgacactgataatggcaagagtgatggtggtgatcactatggagaacagtttgatgacgattacccgaagcagcagtaggtagcaaatggaagttatggctactgatagtagtgttactctgggtggagtacaggtccactgtgctgtgattttgaaaaaagcataacccttctattgtcttctttttaccatgt

SEQ ID NO: 244 - DNA, 319 bp, Nicotiana tabacum
ggatcaggaagggcatgtggctgatgcaggaaaagaaacattgacatctgttcaaacatctgaaattgaagattggacaaaatacaaggatgatgatattatgcaacagcaatcttccatccaggctgaacaagctgtaaaaactcaatttgttggcgataaggaacctttgtcttcattagaagctgaataccatctgggaaattcaattttgctggagaaaataaaggtgctgagtgaacaatatgctgcccttagaagaacacgtggagatggaaattgctttttccgcagtttcatgtttggttaccttgtatgc

SEQ ID NO: 245 - DNA, 381 bp, Nicotiana tabacum
  misc_feature (4)..(4): N = G, C, A or T
ccgncaaacaaagtaaaagatgcaggatcaggaagggcatgtggctgatgcaggaaaagaaacattgacatctgttcaaacatctgaaattgaagattggacaaaatacaaggatgatgatattatgcaacagcaatcttccatccaggctgaacaagctgtaaaaactcaatttgttggcgataaggaacctttgtcttcattagaagctgaataccatctgggaaattcaattttgctggagaaaataaaggtgctgagtgaacaatatgctgcccttagaagaacacgtggagatggaaattgctttttccgcagtttcatgtttggttaccttgagcacattctggaatcacaagaatcaaagcgaagttcatcgca

SEQ ID NO: 246 - DNA, 126 bp, Nicotiana tabacum
  misc_feature (17)..(17): N = G, C, A or T
  misc_feature (20)..(20): N = G, C, A or T
  misc_feature (35)..(36): N = G, C, A or T
  misc_feature (46)..(46): N = G, C, A or T
  misc_feature (55)..(55): N = G, C, A or T
gcaaacctgaaagaaangantggcaatgatatttnntctgatggcnaaggtgaanccagagattactttggtggcgtgcgcaaaccaccaggtggagagagcagcattgcactagtttagatgatg

SEQ ID NO: 247 - DNA, 99 bp, Nicotiana tabacum
  misc_feature (46)..(46): N = G, C, A or T
gaattttagatttcaatggctctcaatgagttacacggaatcaagntctaaagtacctttgcggatgcgagtttgctagaggctggtctctaatgttgg

SEQ ID NO: 248 - DNA, 134 bp, Nicotiana tabacum
cagggtgctttgtgacatatccctgcactgatcacccaggtgacctaactctggtctaagctctgcctaaaggggcattgtgacagatctctgcactgatcactcaggtgatgtaactattgtctaggctctgc

SEQ ID NO: 249 - DNA, 280 bp, Nicotiana tabacum
gaagagtggactctttatgagcaggtagctgttgcagctatggattgtcagtctcttgatgtggcaaaggactgcataaaggtattgcaaaagaagtttccagggagcaaaagggttggtaggctagaagctatgttgctagaggccagaggattgtggtcagaggcagaaaatgcttactcaagccttttggaggaaaatccctttgatcaggttgtacataagaggagggcagccatggcaaaggcgcaaggcaatacgtcagcagcaattgactggc

SEQ ID NO: 250 - DNA, 92 bp, Nicotiana tabacum
ttctgctggaaagtactatgatggtagatttgatgaaccccaacaacaatattttttggatgcttgtttcctttgtaagaaacgccttgcag

SEQ ID NO: 251 - DNA, 158 bp, Nicotiana tabacum
aaactaatatacgagttgtgtctgcatcttcctcaactggtttcatagattgatcaattgtggcaccggcaatgtggtggcgaggtttacatcctcgaattgttccaccggtcaaaagatgacctgcttttctgaaatgaattctgtttcccaagcag

SEQ ID NO: 252 - DNA, 162 bp, Nicotiana tabacum
  misc_feature (15)..(15): N = G, C, A or T
  misc_feature (17)..(17): N = G, C, A or T
  misc_feature (18)..(18): N = G, C, A or T
  misc_feature (24)..(24): N = G, C, A or T
  misc_feature (27)..(27): N = G, C, A or T
  misc_feature (31)..(31): N = G, C, A or T
  misc_feature (36)..(36): N = G, C, A or T
  misc_feature (42)..(42): N = G, C, A or T
  misc_feature (53)..(53): N = G, C, A or T
gcacatttgagagcncnngcgcantgncatntcttnagcagnggaagagtaanttctagatgtaaataccctgctttcccgtaagaactggtttatattgaaagcagaaatgcctctgctggccaattttcgacttataattccagacatatccacttcctc

SEQ ID NO: 253 - DNA, 278 bp, Nicotiana tabacum
  misc_feature (84)..(84): N = G, C, A or T
  misc_feature (160)..(160): N = G, C, A or T
  misc_feature (197)..(197): N = G, C, A or T
  misc_feature (213)..(213): N = G, C, A or T
agcaagtgaaggattggtttctgttcatggtgacgctgtgaagagaatatgatgagtctaaatcaggagtgaggcattctcaanttcattgctcagggagcagaagttgatatgtagattgctactatttgcaagagcactttcctggcatgttagtcanagtcatgttttttgttcctgatcagcagtcttctttnactatctgccctttgnaagagttagccatacgttagagcaatgtgttcttttcaatgttggatatttatttgaacttgatc

SEQ ID NO: 254 - DNA, 301 bp, Nicotiana tabacum
  misc_feature (5)..(5): N = G, C, A or T
  misc_feature (29)..(29): N = G, C, A or T
  misc_feature (56)..(56): N = G, C, A or T
  misc_feature (156)..(156): N = G, C, A or T
  misc_feature (162)..(162): N = G, C, A or T
  misc_feature (171)..(171): N = G, C, A or T
  misc_feature (173)..(173): N = G, C, A or T
  misc_feature (180)..(180): N = G, C, A or T
  misc_feature (187)..(187): N = G, C, A or T
  misc_feature (207)..(207): N = G, C, A or T
  misc_feature (214)..(214): N = G, C, A or T
  misc_feature (217)..(217): N = G, C, A or T
  misc_feature (225)..(225): N = G, C, A or T
  misc_feature (229)..(229): N = G, C, A or T
  misc_feature (230)..(230): N = G, C, A or T
  misc_feature (239)..(239): N = G, C, A or T
  misc_feature (241)..(241): N = G, C, A or T
  misc_feature (245)..(245): N = G, C, A or T
  misc_feature (248)..(248): N = G, C, A or T
  misc_feature (249)..(249): N = G, C, A or T
  misc_feature (262)..(262): N = G, C, A or T
  misc_feature (264)..(264): N = G, C, A or T
  misc_feature (266)..(266): N = G, C, A or T
  misc_feature (273)..(273): N = G, C, A or T
  misc_feature (299)..(299): N = G, C, A or T
agtangcgtagggaagacagggatggcantgctgagaggagggcaaagattgagcnatggaatagggaaaaagaagaggcagaatctgctaaatacaataattttgacactgataatggcaagagtgatggtggtgatcactatggagaacagctngatgangattacccnangcagcantaggtancaagatggaagttatggctnctgatantancgttactntggnnggagtacangnccantgnnctgcagattttgnananagcatancccttctattggattctttttaccangt

SEQ ID NO: 255 - DNA, 411 bp, Nicotiana tabacum
  misc_feature (65)..(65): N = G, C, A or T
  misc_feature (264)..(264): N = G, C, A or T
  misc_feature (308)..(308): N = G, C, A or T
  misc_feature (312)..(312): N = G, C, A or T
  misc_feature (316)..(316): N = G, C, A or T
  misc_feature (323)..(323): N = G, C, A or T
  misc_feature (331)..(331): N = G, C, A or T
  misc_feature (336)..(336): N = G, C, A or T
  misc_feature (338)..(338): N = G, C, A or T
  misc_feature (342)..(342): N = G, C, A or T
  misc_feature (398)..(398): N = G, C, A or T
aagctaacagaatcgtttgtggaataagggtgtcgattccgagagcttccacccccgttatcggnctcatgaaatgcgactaagactaagtaatggagaatccgataaacctttgatagtccatgttggacgacttggagttgagaagagtttggatttcctcaaaagggtcatggatagacttccagatgctcgcattgcttttattggagatgggccatacagggaggaattggagaaaatgttccatggcatgcctgccgngttcacaggtatgttactaggagaggagctttcccaagcatatnccancggngatgttnttcttatnccttnanagtnagagacactggggctcgtcgctttggaggccatgtcatcagggcttcctgtagtanctgcccgtgccgg

SEQ ID NO: 256 - DNA, 168 bp, Nicotiana tabacum
  misc_feature (3)..(3): N = G, C, A or T
  misc_feature (7)..(7): N = G, C, A or T
  misc_feature (9)..(9): N = G, C, A or T
  misc_feature (15)..(15): N = G, C, A or T
  misc_feature (17)..(17): N = G, C, A or T
  misc_feature (25)..(26): N = G, C, A or T
  misc_feature (28)..(28): N = G, C, A or T
  misc_feature (32)..(32): N = G, C, A or T
  misc_feature (35)..(35): N = G, C, A or T
  misc_feature (50)..(50): N = G, C, A or T
  misc_feature (51)..(51): N = G, C, A or T
  misc_feature (55)..(55): N = G, C, A or T
  misc_feature (58)..(58): N = G, C, A or T
  misc_feature (70)..(70): N = G, C, A or T
  misc_feature (142)..(142): N = G, C, A or T
  misc_feature (145)..(145): N = G, C, A or T
  misc_feature (150)..(150): N = G, C, A or T
  misc_feature (156)..(156): N = G, C, A or T
cgntttntnctcggngngtcagctnngnggangcnctgggtgctggttcnnaggnctnatgaaacgctcnaaggcaacaatctggttatgacaactgcgggaaaaattccctttctgcgcaaactctcaaagcgatggactngcnatcanagcaanttttgcatctgc

SEQ ID NO: 257 - DNA, 191 bp, Nicotiana tabacum
  misc_feature (5)..(5): N = G, C, A or T
  misc_feature (8)..(8): N = G, C, A or T
atgangangaggatgaagaagattataagccaccacctaggaagcaatctgataattctgatgaagatgcggagtcttttccgttgaaacgaaagctatctccgaaagaagagcctgagccaaaaaggttgcagcggattgctaaaggctcaaagtctcgagacggtgttttcgctgctttgtgctcaacc

SEQ ID NO: 258 - DNA, 528 bp, Nicotiana tabacum
  misc_feature (495)..(495): N = G, C, A or T
atgatcaagccctagaattcgcgaagatgctcgatcaatcgggaactgtaattgttttgggaaatatcgtattcctgaagcctgaccaggtggtgaaagccatgaaaggcctaatgccaatgcccttggccgaaccaaatgacccaaaaatgatgaaggagcttcaacaaatggaggagaagaaagcagcaattgacaagaaggcagaatcattggtgcggacagagttgtggcgtggactaggttactttgtgattcagacttcagctttcatgaggctcactttctgggagttatcatgggatgtaatggagcctatttgcttctatgtcacatccatttactgcatggctgggtatgctttcttccttaggacctccaaagaaccttcttttgaagggtttttccagagccggtttagtgcaaagcaaaagcgattgatgaagcttcataaatttggatcttcatagggaccaagagctccacagagcttgngatcctcattcgacgatacctggtggaaacacc

SEQ ID NO: 259 - DNA, 84 bp, Nicotiana tabacum
  misc_feature (51)..(51): N = G, C, A or T
cagatggtactgtaaacatgtatgttcatcatgagattattattcctgcgnttcctgtctgcacagcatggatcgattgcccta

SEQ ID NO: 260 - DNA, 112 bp, Nicotiana tabacum
  misc_feature (4)..(4): N = G, C, A or T
  misc_feature (11)..(11): N = G, C, A or T
  misc_feature (19)..(19): N = G, C, A or T
  misc_feature (29)..(29): N = G, C, A or T
  misc_feature (42)..(42): N = G, C, A or T
  misc_feature (46)..(46): N = G, C, A or T
  misc_feature (59)..(59): N = G, C, A or T
ttgnttactcngcccttgnatttcaatgngctaatccattancccncacggaatgacgntctaaagtacctttgcggatgcgagtttgctagaggctggtctctaatgatgg

SEQ ID NO: 261 - DNA, 265 bp, Nicotiana tabacum
  misc_feature (7)..(7): N = G, C, A or T
caataantttatttggaggctttccttccctgcctggtttgatgtcaatgacctatctgaaaatgctattgatgatgatgagggtttagatgcttcagcagcatatgtggcgagtttgttggctacggagccccctcacatcaaacttggggttggaggcttcagcatgggcgcagcgacatctctttattctgcaacttgtttcactcgtgggaagtatgagaatggcaactcgtactctgccaatctgagtgcagctgttgga

SEQ ID NO: 262 - DNA, 90 bp, Nicotiana tabacum
  misc_feature (11)..(11): N = G, C, A or T
  misc_feature (32)..(32): N = G, C, A or T
  misc_feature (38)..(38): N = G, C, A or T
  misc_feature (39)..(39): N = G, C, A or T
  misc_feature (57)..(57): N = G, C, A or T
  misc_feature (67)..(67): N = G, C, A or T
  misc_feature (85)..(85): N = G, C, A or T
ggatcaggttntagcagatacactataatcanagttgnngtggtcatggggcatggntatatttggnggaaggggtggaagcttnccgaa

SEQ ID NO: 263 - DNA, 191 bp, Nicotiana tabacum
  misc_feature (106)..(106): N = G, C, A or T
gtgtcccagcaaggattacccaggtgatgtacctctcatcaaggctctgcctacaggcacattgtgatgtatctctgcactgatcacctaggtcatgtaacttttntctaggctctacctacgatggcattgtgacatatctctgcactaatcatccaagtgatgtaactcttgtctaggatgtgcctaaa

SEQ ID NO: 264 - DNA, 249 bp, Nicotiana tabacum
  misc_feature (4)..(4): N = G, C, A or T
  misc_feature (16)..(16): N = G, C, A or T
  misc_feature (23)..(23): N = G, C, A or T
  misc_feature (30)..(30): N = G, C, A or T
  misc_feature (61)..(61): N = G, C, A or T
  misc_feature (73)..(73): N = G, C, A or T
  misc_feature (113)..(113): N = G, C, A or T
  misc_feature (124)..(124): N = G, C, A or T
  misc_feature (140)..(140): N = G, C, A or T
  misc_feature (141)..(141): N = G, C, A or T
  misc_feature (147)..(147): N = G, C, A or T
  misc_feature (152)..(152): N = G, C, A or T
  misc_feature (157)..(157): N = G, C, A or T
  misc_feature (160)..(160): N = G, C, A or T
  misc_feature (171)..(171): N = G, C, A or T
  misc_feature (207)..(207): N = G, C, A or T
  misc_feature (208)..(208): N = G, C, A or T
  misc_feature (209)..(209): N = G, C, A or T
  misc_feature (225)..(225): N = G, C, A or T
ccgntactctccgctngaccagntcgtttncttcccctttttcaggctggtgacacactantacagtcagtangacaacttcatcactgattttgagacaaagatcaatcttntcaagcttgcncattttgcggtcattnnttctcnggaanacccnganaaagaggctgntataggttaccttgaaggagagactgagaaacttcnnnatactaaggagacacngataaaggagccgattctttatat

SEQ ID NO: 265 - DNA, 287 bp, Nicotiana tabacum
  misc_feature (89)..(89): N = G, C, A or T
ggctgttagtggctcaaaaattgttggctcagccaaagcagaatccattgaaagtggtgaaaggactcgtcacatgcagcctacacttncgaatagtccacacccttctctttcttgcaatgctgttgtatattctgcatatgaagcatccaaggacgaagtaacccaaaataatgcaccagctactgatgattgtggattcttcgagtcaggctatatgcttgcgaacgggacagggcctcctattggagaaagcaactatgacgaagctgttgaatttgatccaa

SEQ ID NO: 266 - DNA, 281 bp, Nicotiana tabacum
  misc_feature (96)..(96): N = G, C, A or T
  misc_feature (254)..(254): N = G, C, A or T
acaaatggttacagatgttatggaaaatcttgtcaagagggctataatggctgaatctgaaactgctttagagaaggagaaggtaacaataggtcntgaagagattcaaagaaaggcgcttcagattgaaaacatgtcaggtaagttagaagagatggaaaggtttgctttgggtacaaattgtatcttgaatgagatgcgccagagagttgaagatttggtcgaagaaacttctagacagaggcagcgagctncagaaaatgagcaggagctttctcgtg

SEQ ID NO: 267 - DNA, 282 bp, Nicotiana tabacum
  misc_feature (2)..(3): N = G, C, A or T
  misc_feature (5)..(5): N = G, C, A or T
  misc_feature (10)..(10): N = G, C, A or T
  misc_feature (15)..(15): N = G, C, A or T
  misc_feature (20)..(20): N = G, C, A or T
  misc_feature (30)..(30): N = G, C, A or T
  misc_feature (32)..(32): N = G, C, A or T
  misc_feature (41)..(42): N = G, C, A or T
  misc_feature (48)..(49): N = G, C, A or T
  misc_feature (51)..(51): N = G, C, A or T
  misc_feature (55)..(55): N = G, C, A or T
  misc_feature (59)..(59): N = G, C, A or T
  misc_feature (60)..(60): N = G, C, A or T
  misc_feature (65)..(66): N = G, C, A or T
  misc_feature (68)..(68): N = G, C, A or T
  misc_feature (72)..(72): N = G, C, A or T
  misc_feature (74)..(74): N = G, C, A or T
  misc_feature (75)..(75): N = G, C, A or T
  misc_feature (81)..(81): N = G, C, A or T
  misc_feature (85)..(85): N = G, C, A or T
  misc_feature (86)..(86): N = G, C, A or T
  misc_feature (93)..(93): N = G, C, A or T
  misc_feature (95)..(95): N = G, C, A or T
  misc_feature (109)..(110): N = G, C, A or T
  misc_feature (123)..(123): N = G, C, A or T
  misc_feature (129)..(129): N = G, C, A or T
  misc_feature (131)..(131): N = G, C, A or T
  misc_feature (135)..(136): N = G, C, A or T
  misc_feature (138)..(138): N = G, C, A or T
  misc_feature (140)..(140): N = G, C, A or T
  misc_feature (144)..(144): N = G, C, A or T
  misc_feature (148)..(149): N = G, C, A or T
  misc_feature (150)..(150): N = G, C, A or T
  misc_feature (156)..(156): N = G, C, A or T
  misc_feature (157)..(157): N = G, C, A or T
  misc_feature (159)..(159): N = G, C, A or T
  misc_feature (161)..(161): N = G, C, A or T
  misc_feature (164)..(164): N = G, C, A or T
  misc_feature (170)..(170): N = G, C, A or T
  174misc_feature (174)..(174): N = G, C, A or T
  misc_feature (174)..(174): N = G, C, A or T
  misc_feature (177)..(177): N = G, C, A or T
  misc_feature (179)..(179): N = G, C, A or T
  misc_feature (191)..(191): N = G, C, A or T
  misc_feature (196)..(196): N = G, C, A or T
  misc_feature (227)..(227): N = G, C, A or T
gnntntggangctgnacatntcatcctcancncaggcctanncttagnncnaggngccnnccatnntncagntnnctcttnccgnnattctantnattcgtgcacatgnngaaacctatgctnttgcgncngctnnangnacantcannnctgcanngncnganccttcntgcncancntaatcaaccttncaacngcatgatgactcttcatgcatagccatatgntatcttcattacgggctttttcagacataccgcttcgttagcaggcatcttaccc

SEQ ID NO: 268 - DNA, 119 bp, Nicotiana tabacum
  misc_feature (87)..(87): N = G, C, A or T
gatattcgtagggcgaggactgttatcttacaaaggatcatcaaacccccaaaccactaaagtgctgaaatttgccttagcagcagngaacatttatctgcttttcatagtttgtgatg

SEQ ID NO: 269 - DNA, 314 bp, Nicotiana tabacum
gggtcaatactctgtcttcactgcgatcgatatttcgcgaatgttgcggtgagggacgagcatttcaagacgaaaaagcacaggaagcgtgtgaaaataatgatgggccctgcaccacacacccaacttgatgctgatttagctgctggaattggcatgccagataatggtccaaagctaatgtcgatgagttgagcttctttcgtcctgtttataactcctacattactggtagagttcttttgaactttgagaatttgtctgaggaacataggtttttgttagtctaccatctctctctcagtatagcaagt

SEQ ID NO: 270 - DNA, 411 bp, Nicotiana tabacum
  misc_feature (12)..(1): N = G, C, A or T
  misc_feature (12)..(13): N = G, C, A or T
  misc_feature (15)..(15): N = G, C, A or T
  misc_feature (20)..(20): N = G, C, A or T
  misc_feature (28)..(28): N = G, C, A or T
  misc_feature (81)..(81): N = G, C, A or T
  misc_feature (274)..(274): N = G, C, A or T
tgatgacctttnngnatctngtaatatntgagaacaatccaaacgttgagagctgcagcaattgatcaagttaccctcttngaagaacagaagatattagctacagaacaagcacagatggtgaagaagcttggtgattcagaaacgaagactgcaatgctcaagtcacaggctgaaagtttagcaaattactgtgatgatgtggccagcactaataaaacacgagcgctgcagaagggagtctgcaagtatagttcctattttttgatacagntggtattgctggttatcgtctttggactgtatgttttgcagatgtcacctgatgctgttgaagttgtaccgacataattttgagaagtgagcctttttcctttttcttgtattttcaacataaagcaacgatgaacg

SEQ ID NO: 271 - DNA, 131 bp, Nicotiana tabacum
  misc_feature (73)..(73): N = G, C, A or T
agggttattcgggtcggacctggcgaatgcaattgctaaagatacaacaatttttgatcgaggtttagatacncatttgagacctaccattgattgtcttaggaaaactttgggcaccgatgaaaatgtag

SEQ ID NO: 272 - DNA, 124 bp, Nicotiana tabacum
  misc_feature (9)..(9): N = G, C, A or T
  misc_feature (13)..(13): N = G, C, A or T
  misc_feature (15)..(15): N = G, C, A or T
  misc_feature (26)..(26): N = G, C, A or T
  misc_feature (30)..(30): N = G, C, A or T
cactcaaantccngncagaatccggngaanttttcggcgagacattccagtagagttcttgtccgaggttttgacatttcagattcatcgaggtctatttcttccttcctcacgttgtttgtgc

SEQ ID NO: 273 - DNA, 304 bp, Nicotiana tabacum
  misc_feature (28)..(29): N = G, C, A or T
  misc_feature (32)..(32): N = G, C, A or T
  misc_feature (87)..(87): N = G, C, A or T
attggccggtcttggacttcaaaaaacnntcncagagcttcgaagtatcacttctaaacctcaatcggagaagaaaaaatataacanagttgactatttctctactcctttgcgccgttccgatcgattgaaaggcaacacccctcccgaatcagaattgcgccgttcgggtcgcttgaatgagaagtcctgctactctgctccaccagcaaaaaggaaattggggctttttgaagaaggagatgttgaagaagataatgagaagagacctgctaatgcacctctcctgagagtgaaagatggc

SEQ ID NO: 274 - DNA, 342 bp, Nicotiana tabacum
  misc_feature (4)..(4): N = G, C, A or T
  misc_feature (11)..(12): N = G, C, A or T
  misc_feature (209)..(209): N = G, C, A or T
gccngctgtgnnctgcagttgttgtaaaggttgaagtagctctagacaaaagcatttgcatgttgaccagatgagcagaactgatgttatttgcagtagaaggaggaggtttcttctcgtcttcagcttctggatatagtaagggcctgacccttctactcttgggtcagaagaacgaagagaagcccatgagagttgcaccgtggaancagtaccagttggtggaccaagaaactgatccggacctccagctggcttccgggaagaacagggttgtccgcgggtgcgcctcctttgtatgctttggtcgcgctgccgctggacttgagagcccatctcccc

SEQ ID NO: 275 - DNA, 225 bp, Nicotiana tabacum
  misc_feature (7)..(7): N = G, C, A or T
  misc_feature (14)..(14): N = G, C, A or T
  misc_feature (157)..(157): N = G, C, A or T
  misc_feature (221)..(221): N = G, C, A or T
cgttctnctggatngttcctggctatattatgggaggggaaaacaggaacaaagagaaagcaagattgcgaaaaggtatatctattcttgttgcaactcctggacgtcttttggatcacctaaaaaacacatcatcattcttgtacacgaacctgcnctggataatttttgatgaagcagacagaattctggaacttggatatggtaaagagattgaaganatac

SEQ ID NO: 276 - DNA, 239 bp, Nicotiana tabacum
tccaggatgatggcactcctgtctcaatatttgcacttacggggagtaatgcaaacgatggacatttagctgctggccgaaatggagtcaagcgacttcgcactgttaggcatccaaatattttgtcatttcttcacagcaccgaagcagaaaattttgatggttctactaccaaggttaccatctatattgttactgaacctgtcatgccactctcggagaagctaaaggaattagga

SEQ ID NO: 277 - DNA, 273 bp, Nicotiana tabacum
  misc_feature (4)..(4): N = G, C, A or T
  misc_feature (20)..(20): N = G, C, A or T
  misc_feature (58)..(58): N = G, C, A or T
  misc_feature (69)..(69): N = G, C, A or T
  misc_feature (73)..(73): N = G, C, A or T
  misc_feature (76)..(76): N = G, C, A or T
  misc_feature (117)..(118): N = G, C, A or T
  misc_feature (128)..(128): N = G, C, A or T
atgngcaaatttgcgatccnagcgtcagatgaatccattacccaggagattgcttcanattttcagggntggntgnatgatctaactgatggtggtgttgagtacatgcctgaagannaagtaaaggnggctgctgctgaaaagctaaagatttcaatggaacggatagcattactaaaggcggcaagacctccccgaagtctccaaaatctgatgatgaagaagaagaggaggaagacgaggatgatgagaaccaaaagaaagaagacatga

SEQ ID NO: 278 - DNA, 283 bp, Nicotiana tabacum
  misc_feature (127)..(127): N = G, C, A or T
ttgtctaagataaaaaatgtaatagtaaagagagctgcagatgaagacatggaaactgcttctatgttgcttaggtgttgctataatttttataaggacactttttgtgcattgctcccatcaggtntaaacctttatatggtgccatctcaatttgctacagaaacatatatccaacctgggatagatgcagttgacatactcgatatgaacacttcacggaagctacttttgtgggcctacacacttctgcatggccattgcacaaatgtctcagctgcta

SEQ ID NO: 279 - DNA, 173 bp, Nicotiana tabacum
  misc_feature (28)..(28): N = G, C, A or T
  misc_feature (35)..(35): N = G, C, A or T
  misc_feature (53)..(53): N = G, C, A or T
  misc_feature (102)..(102): N = G, C, A or T
  misc_feature (111)..(111): N = G, C, A or T
  misc_feature (119)..(119): N = G, C, A or T
  misc_feature (127)..(127): N = G, C, A or T
  misc_feature (151)..(151): N = G, C, A or T
gctttcttgcctgccgtagacacagtgngaagggngagtgcctacatgaatgntttagagtgaaccctgatggtgtcaaagacaaaattagctgtggtgagnttctggatntgactctngaggatgncgataaatgcatagagcttatttntacgccgatccgcaaagatgca

SEQ ID NO: 280 - DNA, 346 bp, Nicotiana tabacum
  misc_feature (49)..(49): N = G, C, A or T
gcgatacgaggcgaaaaaactaagcttccggagagtgtgaaagcagatncccttactaatgaagcttttcttgaccgggggtttactcgccccaaggttctgatcattctccctctagcaagtgttgcatttcgagtagtcaagcggctgattgatttgacacctcctaaatacaagtctaatgtagaggagcgtgaacgtttctatagagaattcggggccggagtaagcaaagatagggaggatgaagatgccgtcgaaagctctgaatcaaagaagagctcaaaaccatctgattttcaagcattatttgggggaaataacaatgatcacttcatgctaggaa

SEQ ID NO: 281 - DNA, 45 bp, Nicotiana tabacum
  misc_feature (22)..(22): N = G, C, A or T
gcggcatgtgaaaatcaactgnttgtgatatcccacctactggac

SEQ ID NO: 282 - DNA, 228 bp, Nicotiana tabacum
  misc_feature (2)..(2): N = G, C, A or T
  misc_feature (11)..(11): N = G, C, A or T
  misc_feature (31)..(31): N = G, C, A or T
  misc_feature (33)..(33): N = G, C, A or T
  misc_feature (39)..(39): N = G, C, A or T
  misc_feature (40)..(40): N = G, C, A or T
  misc_feature (60)..(60): N = G, C, A or T
  misc_feature (93)..(93): N = G, C, A or T
  misc_feature (98)..(98): N = G, C, A or T
  misc_feature (102)..(102): N = G, C, A or T
  misc_feature (105)..(105): N = G, C, A or T
  misc_feature (109)..(109): N = G, C, A or T
  misc_feature (169)..(169): N = G, C, A or T
  misc_feature (176)..(176): N = G, C, A or T
  misc_feature (185)..(185): N = G, C, A or T
gngtacggggnccgggcatagatatgcctgnanggagtnngacaaagcttgcagagtggntcatccttgtcagaccacccctgcatgtatatnttctnttgnttncctntcccagtacaaagatggaccttactccagacagcgtatggtggtaacggatagctaattnagtgcanaggtgttgncctcctcttacttatacctttcagcagtcccccattatcgtgg

SEQ ID NO: 283 - DNA, 264 bp, Nicotiana tabacum
  misc_feature (4)..(4): N = G, C, A or T
  misc_feature (8)..(8): N = G, C, A or T
  misc_feature (19)..(19): N = G, C, A or T
  misc_feature (21)..(22): N = G, C, A or T
  misc_feature (25)..(25): N = G, C, A or T
  misc_feature (31)..(31): N = G, C, A or T
  misc_feature (45)..(45): N = G, C, A or T
  misc_feature (101)..(101): N = G, C, A or T
  misc_feature (123)..(123): N = G, C, A or T
  misc_feature (127)..(127): N = G, C, A or T
  misc_feature (192)..(192): N = G, C, A or T
gctnactnacataataatnannccngaaaantaaaacttcttttnaattataatcataagctctactcggagatgtgaacagcgagttttaggtggacttntgaaagaatgcctcgattcgtngtgntccagaaggaagcggcttctctgttgataatcgaggacgattttgaaccttaggagaaggatcanacggctgtgaaggcacgggaagcgagtcgagaaggaaatcgttcgtaggttgatgccttttcacagcaactc

SEQ ID NO: 284 - DNA, 63 bp, Nicotiana tabacum
ggccatcggagcaaaagagagcaacttacattcttgaactacgtgaagaatcttcagaaccct

SEQ ID NO: 285 - DNA, 57 bp, Nicotiana tabacum
  misc_feature (19)..(19): N = G, C, A or T
  misc_feature (38)..(38): N = G, C, A or T
  misc_feature (40)..(40): N = G, C, A or T
gaaggtgaaaatggatatngcgatatctcaaaggcacntnaggtatggcactttgtt

SEQ ID NO: 286 - DNA, 67 bp, Nicotiana tabacum
  misc_feature (4)..(4): N = G, C, A or T
ctgntcgaatgggatatgcatattcatatgtcctattgtactaatcagagtttcaagattctggctt

SEQ ID NO: 287 - DNA, 81 bp, Nicotiana tabacum
  misc_feature (10)..(10): N = G, C, A or T
  misc_feature (14)..(14): N = G, C, A or T
  misc_feature (16)..(16): N = G, C, A or T
  misc_feature (22)..(22): N = G, C, A or T
  misc_feature (27)..(27): N = G, C, A or T
  misc_feature (29)..(29): N = G, C, A or T
  misc_feature (30)..(30): N = G, C, A or T
  misc_feature (37)..(37): N = G, C, A or T
  misc_feature (52)..(52): N = G, C, A or T
tggataggtnagcnangagcanacgananncctgacngggaaagggatgcantcagactctcactggcttcagcaattctt

SEQ ID NO: 288 - DNA, 92 bp, Nicotiana tabacum
  misc_feature (9)..(9): N = G, C, A or T
  misc_feature (11)..(11): N = G, C, A or T
  misc_feature (12)..(12): N = G, C, A or T
  misc_feature (13)..(13): N = G, C, A or T
  misc_feature (16)..(16): N = G, C, A or T
  misc_feature (17)..(17): N = G, C, A or T
  misc_feature (20)..(20): N = G, C, A or T
  misc_feature (21)..(21): N = G, C, A or T
  misc_feature (24)..(24): N = G, C, A or T
  misc_feature (34)..(34): N = G, C, A or T
  misc_feature (85)..(85): N = G, C, A or T
ttgaaatancnnntgnnaannctnacattagccnctctgttgtgaggaaaggcctattccccctctctatgtacttcatttctgncatacat

SEQ ID NO: 289 - DNA, 224 bp, Nicotiana tabacum
  misc_feature (5)..(6): N = G, C, A or T
  misc_feature (14)..(14): N = G, C, A or T
  misc_feature (48)..(48): N = G, C, A or T
  misc_feature (54)..(54): N = G, C, A or T
  misc_feature (67)..(67): N = G, C, A or T
  misc_feature (75)..(75): N = G, C, A or T
  misc_feature (182)..(182): N = G, C, A or T
  misc_feature (211)..(211): N = G, C, A or T
tgatnnatgctctntaattgccatactcattggtaattgtgttgatgngccttnataacgggttatnatggcctnctctcttctattagcgccaaatgtaggaaagtcattagtttgtgtttagttcaggaacagacatatttcagccgtgccaccggacatcgcatgatgtcaaactctgngaactaatctcactagagacgagaagacnatggcccgctagt

SEQ ID NO: 290 - DNA, 100 bp, Nicotiana tabacum
  misc_feature (12)..(12): N = G, C, A or T
gcagcagaaganatgaaccgaaatgaaggcctgagttcggccccaaacagccgattcaacaacagaaatcaatgcacagattcaatctcgagcagaatgt

SEQ ID NO: 291 - DNA, 128 bp, Nicotiana tabacum
  misc_feature (8)..(8): N = G, C, A or T
  misc_feature (21)..(21): N = G, C, A or T
  misc_feature (45)..(45): N = G, C, A or T
  misc_feature (55)..(55): N = G, C, A or T
  misc_feature (63)..(63): N = G, C, A or T
  misc_feature (70)..(70): N = G, C, A or T
  misc_feature (100)..(100): N = G, C, A or T
  misc_feature (108)..(108): N = G, C, A or T
  misc_feature (113)..(113): N = G, C, A or T
ggcatganaggaacattcacncgtatgagcacgcatgttgcagantctccttcgnggggctgntccaaanattcaccactatgttagcccaggaaattcncctccccntgatncttctgctctgcagt

SEQ ID NO: 292 - DNA, 142 bp, Nicotiana tabacum
  misc_feature (1)..(1): N = G, C, A or T
  misc_feature (15)..(15): N = G, C, A or T
  misc_feature (17)..(17): N = G, C, A or T
  misc_feature (19)..(19): N = G, C, A or T
  misc_feature (20)..(20): N = G, C, A or T
  misc_feature (43)..(43): N = G, C, A or T
  misc_feature (53)..(54): N = G, C, A or T
  misc_feature (55)..(57): N = G, C, A or T
  misc_feature (86)..(86): N = G, C, A or T
  misc_feature (95)..(95): N = G, C, A or T
  misc_feature (106)..(106): N = G, C, A or T
  misc_feature (123)..(123): N = G, C, A or T
ntctgtgccggctcnantnnggatactacagccgaaaccctancgagcgtatnnnnnaagtgcgcaagagattgacagattgtaangctgttacngagaatgctgngtagggaagtccataangaccgcgtgattactatgt

SEQ ID NO: 293 - DNA, 77 bp, Nicotiana tabacum
  misc_feature (1)..(1): N = G, C, A or T
nggagtagtaatacccgtgtggatagtaccaaactcaattactttaggagggtatgttgctcaacctaccaactggc

SEQ ID NO: 294 - DNA, 83 bp, Nicotiana tabacum
  misc_feature (5)..(5): N = G, C, A or T
  misc_feature (8)..(8): N = G, C, A or T
  misc_feature (18)..(18): N = G, C, A or T
  misc_feature (24)..(26): N = G, C, A or T
  misc_feature (29)..(29): N = G, C, A or T
  misc_feature (38)..(38): N = G, C, A or T
  misc_feature (39)..(39): N = G, C, A or T
  misc_feature (46)..(46): N = G, C, A or T
  misc_feature (47)..(49): N = G, C, A or T
  misc_feature (54)..(54): N = G, C, A or T
  misc_feature (70)..(70): N = G, C, A or T
  misc_feature (72)..(72): N = G, C, A or T
  misc_feature (73)..(74): N = G, C, A or T
  misc_feature (77)..(77): N = G, C, A or T
  misc_feature (78)..(78): N = G, C, A or T
  misc_feature (80)..(80): N = G, C, A or T
ctttnggnagtccgaacnccctcnnnganagaccaaanngatgcgnnnngctcntgcaaagggtgaggancnnnatnntngcc

SEQ ID NO: 295 - DNA, 42 bp, Nicotiana tabacum
ttgcagaattgatgtggttgctttgctctaaaagttggaact

SEQ ID NO: 296 - DNA, 106 bp, Nicotiana tabacum
  misc_feature (8)..(8): N = G, C, A or T
  misc_feature (14)..(14): N = G, C, A or T
  misc_feature (16)..(16): N = G, C, A or T
  misc_feature (18)..(19): N = G, C, A or T
  misc_feature (21)..(21): N = G, C, A or T
  misc_feature (24)..(24): N = G, C, A or T
  misc_feature (26)..(26): N = G, C, A or T
  misc_feature (35)..(35): N = G, C, A or T
  misc_feature (36)..(36): N = G, C, A or T
  misc_feature (38)..(38): N = G, C, A or T
  misc_feature (47)..(47): N = G, C, A or T
  misc_feature (65)..(65): N = G, C, A or T
  misc_feature (67)..(67): N = G, C, A or T
  misc_feature (74)..(74): N = G, C, A or T
tttgaagncctttnancnncnctnanaggggctgnngntggacgcancacacgattcacattctncnccttagncgaacgtggtgttcggaacagtttacatcact

SEQ ID NO: 297 - DNA, 78 bp, Nicotiana tabacum
  misc_feature (2)..(2): N = G, C, A or T
  misc_feature (7)..(7): N = G, C, A or T
  misc_feature (13)..(13): N = G, C, A or T
  misc_feature (18)..(18): N = G, C, A or T
  misc_feature (31)..(31): N = G, C, A or T
  misc_feature (35)..(35): N = G, C, A or T
  misc_feature (37)..(37): N = G, C, A or T
  misc_feature (46)..(46): N = G, C, A or T
ancccanggttanatggngaatcacacgatnacanancttctcctnagccgacgcctgtacggaacagcatactcact

SEQ ID NO: 298 - DNA, 90 bp, Nicotiana tabacum
  misc_feature (2)..(2): N = G, C, A or T
  misc_feature (7)..(7): N = G, C, A or T
  misc_feature (8)..(8): N = G, C, A or T
  misc_feature (10)..(10): N = G, C, A or T
  misc_feature (13)..(13): N = G, C, A or T
  misc_feature (14)..(14): N = G, C, A or T
  misc_feature (19)..(20): N = G, C, A or T
  misc_feature (22)..(22): N = G, C, A or T
  misc_feature (26)..(26): N = G, C, A or T
  misc_feature (32)..(32): N = G, C, A or T
  misc_feature (33)..(33): N = G, C, A or T
  misc_feature (35)..(35): N = G, C, A or T
  misc_feature (37)..(37): N = G, C, A or T
  misc_feature (42)..(42): N = G, C, A or T
  misc_feature (46)..(46): N = G, C, A or T
  misc_feature (62)..(62): N = G, C, A or T
  misc_feature (71)..(71): N = G, C, A or T
  misc_feature (88)..(88): N = G, C, A or T
gnttagnnanccnncggtnngngatnggatgnngntnagggnctgnttcaatcctgtatagngactctttnttacccgttgtgttccnct

SEQ ID NO: 299 - DNA, 130 bp, Nicotiana tabacum
  misc_feature (7)..(7): N = G, C, A or T
  misc_feature (12)..(12): N = G, C, A or T
  misc_feature (18)..(18): N = G, C, A or T
  misc_feature (36)..(36): N = G, C, A or T
  misc_feature (64)..(64): N = G, C, A or T
  misc_feature (74)..(74): N = G, C, A or T
  misc_feature (106)..(106): N = G, C, A or T
cctaganagcgngctccngaagagaataaggcaatngccaaagttgcaaaagttcatgcccctncgttagcagnttggatcaattggcacaggagggcctcagctntgcctcgaagatctaaagctttac

SEQ ID NO: 300 - DNA, 143 bp, Nicotiana tabacum
  misc_feature (63)..(63): N = G, C, A or T
ggccctgacgtctcctctatattttatttcctatttcatcttttttgcttcagaaacaatgtntccttttattctcggaccttgtatttagcagtcttagaacgtcggtgacattgtgacactaggttttgggtgattatggc

SEQ ID NO: 301 - DNA, 228 bp, Nicotiana tabacum
  misc_feature (1)..(1): N = G, C, A or T
  misc_feature (4)..(4): N = G, C, A or T
  misc_feature (73)..(73): N = G, C, A or T
  misc_feature (88)..(88): N = G, C, A or T
  misc_feature (91)..(91): N = G, C, A or T
  misc_feature (116)..(116): N = G, C, A or T
  misc_feature (118)..(118): N = G, C, A or T
  misc_feature (131)..(131): N = G, C, A or T
nttntaacatcacgcatgcataacaaactgtcaattggtgtgaatattcagaagtctcttattcatatcaatnctcagggggaatatnacnactctccaggaaaaagacgtttcananacggacagctgcnaagagatgcagtatgacaagaaattcattcctcttcctccgcctcctccagccatttcacaaagggctccagcgacttgacaaagttttgcctgccc

SEQ ID NO: 302 - DNA, 82 bp, Nicotiana tabacum
  misc_feature (51)..(51): N = G, C, A or T
ataaactctcaagtcctggcggccagaaaaccagctttcaggcggggcggnggggctccccctccccttgcttcgtctctgc

SEQ ID NO: 303 - DNA, 59 bp, Nicotiana tabacum
  misc_feature (11)..(11): N = G, C, A or T
  misc_feature (21)..(21): N = G, C, A or T
  misc_feature (27)..(27): N = G, C, A or T
  misc_feature (36)..(36): N = G, C, A or T
  misc_feature (40)..(40): N = G, C, A or T
  misc_feature (49)..(49): N = G, C, A or T
  misc_feature (56)..(56): N = G, C, A or T
gtaggagtcgnggatgagganagaagngtcctgagnaatngagggaganggtggangat

SEQ ID NO: 304 - DNA, 79 bp, Nicotiana tabacum
  misc_feature (1)..(1): N = G, C, A or T
  misc_feature (6)..(6): N = G, C, A or T
  misc_feature (9)..(9): N = G, C, A or T
  misc_feature (16)..(16): N = G, C, A or T
  misc_feature (18)..(18): N = G, C, A or T
  misc_feature (25)..(25): N = G, C, A or T
  misc_feature (33)..(33): N = G, C, A or T
  misc_feature (38)..(38): N = G, C, A or T
  misc_feature (45)..(45): N = G, C, A or T
  misc_feature (55)..(55): N = G, C, A or T
  misc_feature (66)..(66): N = G, C, A or T
  misc_feature (73)..(73): N = G, C, A or T
ncccantgntttgacncngtggtgngaggggtnttaanatgattnagtgctattngctagagtggntataagncttgga

SEQ ID NO: 305 - DNA, 79 bp, Nicotiana tabacum
  misc_feature (2)..(2): N = G, C, A or T
  misc_feature (7)..(7): N = G, C, A or T
  misc_feature (22)..(22): N = G, C, A or T
  misc_feature (26)..(26): N = G, C, A or T
  misc_feature (32)..(32): N = G, C, A or T
  misc_feature (40)..(40): N = G, C, A or T
  misc_feature (57)..(57): N = G, C, A or T
  misc_feature (59)..(59): N = G, C, A or T
  misc_feature (68)..(68): N = G, C, A or T
  misc_feature (71)..(71): N = G, C, A or T
  misc_feature (74)..(74): N = G, C, A or T
  misc_feature (76)..(76): N = G, C, A or T
cncgatngtaaacgccccgcancggntatggntaaaaagnagaccctcaacaaaatnanggaattganacntancnaaa

SEQ ID NO: 306 - DNA, 88 bp, Nicotiana tabacum
  misc_feature (3)..(3): N = G, C, A or T
  misc_feature (5)..(5): N = G, C, A or T
  misc_feature (9)..(9): N = G, C, A or T
  misc_feature (10)..(10): N = G, C, A or T
  misc_feature (21)..(21): N = G, C, A or T
  misc_feature (24)..(24): N = G, C, A or T
  misc_feature (32)..(32): N = G, C, A or T
  misc_feature (44)..(44): N = G, C, A or T
  misc_feature (50)..(50): N = G, C, A or T
  misc_feature (59)..(59): N = G, C, A or T
  misc_feature (65)..(65): N = G, C, A or T
  misc_feature (66)..(66): N = G, C, A or T
  misc_feature (67)..(67): N = G, C, A or T
  misc_feature (74)..(74): N = G, C, A or T
  misc_feature (76)..(76): N = G, C, A or T
  misc_feature (83)..(83): N = G, C, A or T
acnantatnngaaggtagagngtntgatgggngaaaaacgaatngggacngggggtgcntaaacnnnagtcagntngaagaanataga

SEQ ID NO: 307 - DNA, 71 bp, Nicotiana tabacum
  misc_feature (2)..(2): N = G, C, A or T
  misc_feature (4)..(5): N = G, C, A or T
  misc_feature (8)..(8): N = G, C, A or T
  misc_feature (32)..(32): N = G, C, A or T
  misc_feature (53)..(53): N = G, C, A or T
  misc_feature (58)..(58): N = G, C, A or T
  misc_feature (62)..(62): N = G, C, A or T
gntnnatnagcactctgttgtgaggtaagggnctggtgcccctcgggatgtanttcantatngccggagat

SEQ ID NO: 308 - DNA, 102 bp, Nicotiana tabacum
  misc_feature (1)..(1): N = G, C, A or T
  misc_feature (5)..(5): N = G, C, A or T
  misc_feature (45)..(45): N = G, C, A or T
  misc_feature (74)..(74): N = G, C, A or T
ntttngggtgacaagtcttatgtctcaggaatagcgccattcatnggtcgcaaaaagcttgaagaacaaactgntctgattttgttcaactttttcttctat

SEQ ID NO: 309 - DNA, 117 bp, Nicotiana tabacum
  misc_feature (6)..(6): N = G, C, A or T
  misc_feature (22)..(22): N = G, C, A or T
  misc_feature (30)..(30): N = G, C, A or T
  misc_feature (34)..(34): N = G, C, A or T
  misc_feature (44)..(44): N = G, C, A or T
  misc_feature (48)..(48): N = G, C, A or T
  misc_feature (53)..(53): N = G, C, A or T
  misc_feature (64)..(64): N = G, C, A or T
  misc_feature (79)..(79): N = G, C, A or T
  misc_feature (82)..(82): N = G, C, A or T
  misc_feature (90)..(90): N = G, C, A or T
  misc_feature (93)..(94): N = G, C, A or T
  misc_feature (97)..(97): N = G, C, A or T
  misc_feature (98)..(98): N = G, C, A or T
  misc_feature (105)..(105): N = G, C, A or T
  misc_feature (110)..(110): N = G, C, A or T
  misc_feature (117)..(117): N = G, C, A or T
cacctntcaacagcatccagcnactctaancgcnagaaaaacanccgngcctncattgaaaccnccattttgcttttgntgntcgaagcnctnntcnncagatcncgatnctgaaan

SEQ ID NO: 310 - DNA, 90 bp, Nicotiana tabacum
  misc_feature (8)..(8): N = G, C, A or T
  misc_feature (19)..(19): N = G, C, A or T
  misc_feature (32)..(32): N = G, C, A or T
  misc_feature (37)..(37): N = G, C, A or T
  misc_feature (46)..(46): N = G, C, A or T
  misc_feature (50)..(50): N = G, C, A or T
  misc_feature (51)..(51): N = G, C, A or T
  misc_feature (73)..(73): N = G, C, A or T
  misc_feature (80)..(80): N = G, C, A or T
  misc_feature (82)..(82): N = G, C, A or T
ccaaagtntccggctccanagggttagcaagngggangatggcgtngggnnagcgagaatgaaagccttcatnatcccangnagagaaca

SEQ ID NO: 311 - DNA, 132 bp, Nicotiana tabacum
  misc_feature (11)..(11): N = G, C, A or T
  misc_feature (13)..(13): N = G, C, A or T
  misc_feature (17)..(17): N = G, C, A or T
  misc_feature (20)..(20): N = G, C, A or T
  misc_feature (34)..(34): N = G, C, A or T
  misc_feature (42)..(42): N = G, C, A or T
  misc_feature (43)..(46): N = G, C, A or T
  misc_feature (50)..(50): N = G, C, A or T
  misc_feature (58)..(58): N = G, C, A or T
  misc_feature (71)..(71): N = G, C, A or T
  misc_feature (74)..(74): N = G, C, A or T
  misc_feature (79)..(79): N = G, C, A or T
  misc_feature (89)..(90): N = G, C, A or T
  misc_feature (95)..(95): N = G, C, A or T
  misc_feature (97)..(97): N = G, C, A or T
  misc_feature (104)..(104): N = G, C, A or T
  misc_feature (106)..(106): N = G, C, A or T
  misc_feature (108)..(108): N = G, C, A or T
cccattttcancnaccnaangcagcctaggttanaacctctnnnnnctgnacaagcancaggctttaaagntgnatgantgaggtcganngcgancntctcagntntnccagtatcctcgcgcctgaaccta

SEQ ID NO: 312 - DNA, 62 bp, Nicotiana tabacum
  misc_feature (2)..(2): N = G, C, A or T
  misc_feature (8)..(8): N = G, C, A or T
  misc_feature (26)..(26): N = G, C, A or T
  misc_feature (39)..(39): N = G, C, A or T
  misc_feature (41)..(41): N = G, C, A or T
ancctgcntgttgtaaccgcctgggntactaattgtatnanctctgctataaatttttttat

SEQ ID NO: 313 - DNA, 114 bp, Nicotiana tabacum
  misc_feature (1)..(4): N = G, C, A or T
  misc_feature (7)..(11): N = G, C, A or T
  misc_feature (18)..(18): N = G, C, A or T
  misc_feature (36)..(36): N = G, C, A or T
  misc_feature (47)..(47): N = G, C, A or T
  misc_feature (48)..(48): N = G, C, A or T
  misc_feature (54)..(58): N = G, C, A or T
  misc_feature (80)..(80): N = G, C, A or T
  misc_feature (82)..(82): N = G, C, A or T
  misc_feature (83)..(85): N = G, C, A or T
  misc_feature (90)..(91): N = G, C, A or T
  misc_feature (104)..(104): N = G, C, A or T
  misc_feature (110)..(110): N = G, C, A or T
nnnnctnnnnntggggantagaaccattttgttcanttcactttagnntttgtnatgnaatgaaataatagctatatccntnnnntgaannaaatgatggctgntgctgngggg

SEQ ID NO: 314 - DNA, 105 bp, Nicotiana tabacum
  misc_feature (11)..(11): N = G, C, A or T
  misc_feature (13)..(13): N = G, C, A or T
  misc_feature (21)..(22): N = G, C, A or T
  misc_feature (23)..(23): N = G, C, A or T
  misc_feature (25)..(25): N = G, C, A or T
  misc_feature (32)..(34): N = G, C, A or T
  misc_feature (41)..(42): N = G, C, A or T
  misc_feature (45)..(45): N = G, C, A or T
  misc_feature (51)..(51): N = G, C, A or T
  misc_feature (55)..(55): N = G, C, A or T
  misc_feature (57)..(58): N = G, C, A or T
  misc_feature (61)..(61): N = G, C, A or T
  misc_feature (77)..(77): N = G, C, A or T
  misc_feature (91)..(91): N = G, C, A or T
  misc_feature (95)..(95): N = G, C, A or T
  misc_feature (102)..(102): N = G, C, A or T
ctgttttgggngncaaggatnnngnctgaggnnnagcgccnntcnttgttncgcnannagnttgcagaacaaactgntgctgattatgcanaacnttgcctnctg

SEQ ID NO: 315 - DNA, 72 bp, Nicotiana tabacum
  misc_feature (3)..(3): N = G, C, A or T
  misc_feature (7)..(7): N = G, C, A or T
  misc_feature (9)..(9): N = G, C, A or T
  misc_feature (16)..(16): N = G, C, A or T
  misc_feature (20)..(20): N = G, C, A or T
  misc_feature (31)..(31): N = G, C, A or T
  misc_feature (41)..(41): N = G, C, A or T
  misc_feature (66)..(66): N = G, C, A or T
ccnggangnagacccnctgntggcatcaggntatactagcntcaactagggagtggagaccctatnttgaca

SEQ ID NO: 316 - DNA, 54 bp, Nicotiana tabacum
  misc_feature (1)..(1): N = G, C, A or T
  misc_feature (3)..(3): N = G, C, A or T
  misc_feature (5)..(5): N = G, C, A or T
  misc_feature (11)..(12): N = G, C, A or T
  misc_feature (23)..(23): N = G, C, A or T
  misc_feature (25)..(25): N = G, C, A or T
  misc_feature (31)..(31): N = G, C, A or T
  misc_feature (40)..(40): N = G, C, A or T
  misc_feature (45)..(46): N = G, C, A or T
  misc_feature (51)..(51): N = G, C, A or T
ncntnagatgnntaaaatggtgngntgcttnggctctaangaagnnggggnact

SEQ ID NO: 317 - DNA, 77 bp, Nicotiana tabacum
  misc_feature (1)..(1): N = G, C, A or T
  misc_feature (6)..(12): N = G, C, A or T
  misc_feature (23)..(24): N = G, C, A or T
  misc_feature (36)..(36): N = G, C, A or T
  misc_feature (47)..(47): N = G, C, A or T
  misc_feature (71)..(71): N = G, C, A or T
ntcgtnnnnnnnctgtgtactgnnatatgtgtctgnattactcctgntgtaatgcattgacttatacgggncttggg

SEQ ID NO: 318 - DNA, 58 bp, Nicotiana tabacum
  misc_feature (2)..(2): N = G, C, A or T
  misc_feature (4)..(4): N = G, C, A or T
  misc_feature (7)..(7): N = G, C, A or T
  misc_feature (17)..(17): N = G, C, A or T
  misc_feature (29)..(29): N = G, C, A or T
  misc_feature (43)..(43): N = G, C, A or T
  misc_feature (46)..(46): N = G, C, A or T
  misc_feature (51)..(51): N = G, C, A or T
  misc_feature (56)..(56): N = G, C, A or T
tngntangcccctattngttacaggatcnctactttcccacanaanatcgnccatngc

SEQ ID NO: 319 - DNA, 91 bp, Nicotiana tabacum
  misc_feature (3)..(3): N = G, C, A or T
  misc_feature (7)..(7): N = G, C, A or T
  misc_feature (15)..(16): N = G, C, A or T
  misc_feature (42)..(42): N = G, C, A or T
  misc_feature (48)..(48): N = G, C, A or T
ttntaanaccccatnntgcatctcacataatggaccggccancaatangtgaattagctggatgatattcaaacgaaaattcatcatctcc

SEQ ID NO: 320 - DNA, 191 bp, Nicotiana tabacum
  misc_feature (4)..(4): N = G, C, A or T
  misc_feature (16)..(16): N = G, C, A or T
  misc_feature (19)..(19): N = G, C, A or T
  misc_feature (107)..(107): N = G, C, A or T
ttgnaagccctagttntancccagcaggggctgctcctgaagggcaattttacccaccttattatccaccctatgggtatacgccaccacctctaccatatcaacantattatcctcaaccttatcaagctacaaccccactccacctggtggtcagcaagccacacatcagcagcagcggcacaacaacc

SEQ ID NO: 321 - DNA, 190 bp, Nicotiana tabacum
  misc_feature (17)..(17): N = G, C, A or T
  misc_feature (25)..(25): N = G, C, A or T
  misc_feature (44)..(44): N = G, C, A or T
  misc_feature (47)..(47): N = G, C, A or T
  misc_feature (49)..(49): N = G, C, A or T
  misc_feature (77)..(77): N = G, C, A or T
  misc_feature (78)..(78): N = G, C, A or T
  misc_feature (80)..(80): N = G, C, A or T
  misc_feature (92)..(92): N = G, C, A or T
  misc_feature (110)..(110): N = G, C, A or T
  misc_feature (135)..(135): N = G, C, A or T
  misc_feature (153)..(153): N = G, C, A or T
  misc_feature (157)..(157): N = G, C, A or T
tttgtagccctagttgntcccaggnggggctgctcgtgaagggnaantntacccaccttattatccaccctatgggnntncgccaccacctntaccatatcaacagtatnatcctcaaccttatcaagctacaancccactccacctggtggncagnaagccacacatcagcagcagcggcacaacaacc

SEQ ID NO: 322 - DNA, 75 bp, Nicotiana tabacum
  misc_feature (23)..(23): N = G, C, A or T
  misc_feature (45)..(45): N = G, C, A or T
  misc_feature (62)..(62): N = G, C, A or T
  misc_feature (70)..(70): N = G, C, A or T
tgcccagggaatgggtattgggngcagttgtaccgggaacactanatgactatcaaaaatgngcttcacnggaca

SEQ ID NO: 323 - DNA, 71 bp, Nicotiana tabacum
  misc_feature (4)..(5): N = G, C, A or T
  misc_feature (11)..(11): N = G, C, A or T
  misc_feature (13)..(13): N = G, C, A or T
  misc_feature (15)..(15): N = G, C, A or T
  misc_feature (23)..(23): N = G, C, A or T
  misc_feature (24)..(24): N = G, C, A or T
  misc_feature (27)..(27): N = G, C, A or T
  misc_feature (30)..(31): N = G, C, A or T
  misc_feature (63)..(63): N = G, C, A or T
gctnnggaatngnantggagcanntgnacnnggacactacatgactatcaaaaatgggcgtcntcacgaca

SEQ ID NO: 324 - DNA, 90 bp, Nicotiana tabacum
tgaaactatgtgcaagaattagtcagttgacaataatttgattgagtctttcaattcttagcattttggaagctagatacaagcctatga

SEQ ID NO: 325 - DNA, 171 bp, Nicotiana tabacum
  misc_feature (4)..(4): N = G, C, A or T
  misc_feature (9)..(10): N = G, C, A or T
  misc_feature (26)..(26): N = G, C, A or T
  misc_feature (32)..(33): N = G, C, A or T
  misc_feature (52)..(52): N = G, C, A or T
  misc_feature (56)..(56): N = G, C, A or T
  misc_feature (58)..(58): N = G, C, A or T
  misc_feature (65)..(65): N = G, C, A or T
  misc_feature (73)..(73): N = G, C, A or T
  misc_feature (98)..(98): N = G, C, A or T
  misc_feature (105)..(105): N = G, C, A or T
atcntgatnntcggccatctggtacntggaannggcgctggtgagacttgantctngncagaggnggaccccnagccacgagcaggatgctgcattancattgcnatcagcagtataggaattctcttgctctggccagatcgaatttgagggccatggcatcaagagcca

SEQ ID NO: 326 - DNA, 111 bp, Nicotiana tabacum
  misc_feature (38)..(39): N = G, C, A or T
gttaatacccggatgtggaacaggaacttcagtctgtnngataagaattacctctccagcatccaggctcagcagactctgcatcagatttcttcacaattcaatggtgct

SEQ ID NO: 327 - DNA, 142 bp, Nicotiana tabacum
  misc_feature (6)..(6): N = G, C, A or T
  misc_feature (12)..(12): N = G, C, A or T
  misc_feature (17)..(17): N = G, C, A or T
  misc_feature (36)..(36): N = G, C, A or T
tttttntagctnctaanagcccaaatttctccgagnccaaaacaaggtcaaggtccaaacagtgaattggccttggagcagggcgtgaaagactctgatatagatgctgcaaaagttgctgcattgaaggctgctgaactag

SEQ ID NO: 328 - DNA, 156 bp, Nicotiana tabacum
  misc_feature (2)..(3): N = G, C, A or T
  misc_feature (6)..(6): N = G, C, A or T
  misc_feature (10)..(11): N = G, C, A or T
  misc_feature (16)..(16): N = G, C, A or T
  misc_feature (33)..(33): N = G, C, A or T
  misc_feature (36)..(36): N = G, C, A or T
  misc_feature (40)..(40): N = G, C, A or T
  misc_feature (48)..(48): N = G, C, A or T
  misc_feature (50)..(50): N = G, C, A or T
  misc_feature (58)..(58): N = G, C, A or T
  misc_feature (63)..(63): N = G, C, A or T
  misc_feature (76)..(76): N = G, C, A or T
  misc_feature (90)..(90): N = G, C, A or T
  misc_feature (115)..(115): N = G, C, A or T
  misc_feature (127)..(127): N = G, C, A or T
  misc_feature (135)..(135): N = G, C, A or T
  misc_feature (138)..(138): N = G, C, A or T
  misc_feature (144)..(144): N = G, C, A or T
  misc_feature (145)..(146): N = G, C, A or T
  misc_feature (149)..(149): N = G, C, A or T
  misc_feature (155)..(155): N = G, C, A or T
tnngcngatnntaaantcccctcttcgacgacnacngctnagcatgcntntgtctgangagtnctaaaggctgttnccaaatttactagntcttgacatgcgtatctaactggantgattggtagantataaaantgngacaannngtntgactng

SEQ ID NO: 329 - DNA, 172 bp, Nicotiana tabacum
  misc_feature (13)..(13): N = G, C, A or T
  misc_feature (33)..(33): N = G, C, A or T
  misc_feature (64)..(64): N = G, C, A or T
  misc_feature (78)..(78): N = G, C, A or T
  misc_feature (83)..(83): N = G, C, A or T
  misc_feature (93)..(93): N = G, C, A or T
  misc_feature (96)..(96): N = G, C, A or T
  misc_feature (100)..(100): N = G, C, A or T
  misc_feature (109)..(110): N = G, C, A or T
  misc_feature (122)..(122): N = G, C, A or T
  misc_feature (124)..(124): N = G, C, A or T
  misc_feature (135)..(135): N = G, C, A or T
  misc_feature (142)..(142): N = G, C, A or T
  misc_feature (144)..(144): N = G, C, A or T
  misc_feature (147)..(147): N = G, C, A or T
  misc_feature (153)..(153): N = G, C, A or T
tttaaaacccttntaaaaaccgaaaaatgcttntaaaagggtccaaggcagagaccaagaaaantaactgttgaagancgganagatggaagnaangtanaattttgtnnaaggatatggtnangattgtttttnaagagangncgnaaaacnaaccccaaaattcctccag

SEQ ID NO: 330 - DNA, 242 bp, Nicotiana tabacum
  misc_feature (12)..(12): N = G, C, A or T
  misc_feature (20)..(20): N = G, C, A or T
  misc_feature (35)..(35): N = G, C, A or T
  misc_feature (38)..(38): N = G, C, A or T
  misc_feature (48)..(48): N = G, C, A or T
  misc_feature (52)..(52): N = G, C, A or T
  misc_feature (57)..(57): N = G, C, A or T
  misc_feature (64)..(65): N = G, C, A or T
  misc_feature (68)..(68): N = G, C, A or T
  misc_feature (71)..(71): N = G, C, A or T
  misc_feature (73)..(74): N = G, C, A or T
  misc_feature (75)..(75): N = G, C, A or T
  misc_feature (79)..(79): N = G, C, A or T
  misc_feature (81)..(81): N = G, C, A or T
  misc_feature (84)..(85): N = G, C, A or T
  misc_feature (91)..(91): N = G, C, A or T
  misc_feature (98)..(98): N = G, C, A or T
  misc_feature (101)..(101): N = G, C, A or T
  misc_feature (110)..(110): N = G, C, A or T
  misc_feature (113)..(113): N = G, C, A or T
  misc_feature (116)..(116): N = G, C, A or T
  misc_feature (120)..(120): N = G, C, A or T
  misc_feature (130)..(130): N = G, C, A or T
  misc_feature (131)..(131): N = G, C, A or T
  misc_feature (133)..(133): N = G, C, A or T
  misc_feature (136)..(136): N = G, C, A or T
  misc_feature (139)..(139): N = G, C, A or T
  misc_feature (148)..(148): N = G, C, A or T
  misc_feature (157)..(157): N = G, C, A or T
  misc_feature (159)..(159): N = G, C, A or T
  misc_feature (185)..(185): N = G, C, A or T
  misc_feature (188)..(188): N = G, C, A or T
  misc_feature (190)..(190): N = G, C, A or T
  misc_feature (193)..(193): N = G, C, A or T
  misc_feature (199)..(199): N = G, C, A or T
  misc_feature (219)..(219): N = G, C, A or T
  misc_feature (225)..(225): N = G, C, A or T
  misc_feature (226)..(226): N = G, C, A or T
  misc_feature (233)..(233): N = G, C, A or T
  misc_feature (235)..(235): N = G, C, A or T
  misc_feature (236)..(236): N = G, C, A or T
  misc_feature (239)..(239): N = G, C, A or T
ttttagcggctnctaaagcncggactaagagaccntcngcaaatggcnaggnttgcnaggtaanngcntgncnnncgcnantcnnagtgcncccttcnatnttagtactnttncgnattnttagactatnnanggnganagtagtacngaccggaanangaggctcgagacttgtgacaccagancanantgngctacncccccgctaggtattgtacncttccnnatgaacntnncgntgc

SEQ ID NO: 331 - DNA, 128 bp, Nicotiana tabacum
  misc_feature (2)..(2): N = G, C, A or T
  misc_feature (4)..(10): N = G, C, A or T
  misc_feature (13)..(13): N = G, C, A or T
  misc_feature (20)..(20): N = G, C, A or T
  misc_feature (22)..(22): N = G, C, A or T
  misc_feature (24)..(24): N = G, C, A or T
  misc_feature (39)..(39): N = G, C, A or T
  misc_feature (75)..(75): N = G, C, A or T
tncnnnnnnnctnccgagcngntntctctgacttaggtntatattctaggaactcttcagtgggaaatgccgttnaaattatgatactaactgttaaggtaggaaagattactggttgacacagcata

SEQ ID NO: 332 - DNA, 140 bp, Nicotiana tabacum
  misc_feature (2)..(4): N = G, C, A or T
  misc_feature (5)..(5): N = G, C, A or T
  misc_feature (9)..(9): N = G, C, A or T
  misc_feature (10)..(12): N = G, C, A or T
  misc_feature (15)..(15): N = G, C, A or T
  misc_feature (19)..(19): N = G, C, A or T
  misc_feature (20)..(20): N = G, C, A or T
  misc_feature (26)..(26): N = G, C, A or T
  misc_feature (44)..(44): N = G, C, A or T
  misc_feature (47)..(47): N = G, C, A or T
  misc_feature (48)..(48): N = G, C, A or T
  misc_feature (53)..(54): N = G, C, A or T
  misc_feature (77)..(77): N = G, C, A or T
  misc_feature (91)..(91): N = G, C, A or T
  misc_feature (96)..(96): N = G, C, A or T
  misc_feature (97)..(99): N = G, C, A or T
  misc_feature (102)..(103): N = G, C, A or T
  misc_feature (108)..(108): N = G, C, A or T
  misc_feature (112)..(112): N = G, C, A or T
  misc_feature (117)..(117): N = G, C, A or T
  misc_feature (123)..(123): N = G, C, A or T
  misc_feature (124)..(124): N = G, C, A or T
  misc_feature (127)..(127): N = G, C, A or T
  misc_feature (130)..(130): N = G, C, A or T
  misc_feature (139)..(139): N = G, C, A or T
gnnnntgtnnnnggngtgnncgcatngggtgagtggagttcacnagnntgggnnactgaaatttatagagacgctantgagggggcggagnggccnnnntcnnattcngacnttctngtgccnnatnacnattagaagna

SEQ ID NO: 333 - DNA, 147 bp, Nicotiana tabacum
  misc_feature (4)..(6): N = G, C, A or T
  misc_feature (8)..(11): N = G, C, A or T
  misc_feature (14)..(14): N = G, C, A or T
  misc_feature (25)..(25): N = G, C, A or T
  misc_feature (29)..(29): N = G, C, A or T
  misc_feature (38)..(38): N = G, C, A or T
  misc_feature (49)..(49): N = G, C, A or T
  misc_feature (67)..(67): N = G, C, A or T
  misc_feature (85)..(85): N = G, C, A or T
  misc_feature (87)..(87): N = G, C, A or T
  misc_feature (89)..(89): N = G, C, A or T
  misc_feature (96)..(96): N = G, C, A or T
  misc_feature (103)..(104): N = G, C, A or T
  misc_feature (109)..(110): N = G, C, A or T
  misc_feature (121)..(121): N = G, C, A or T
  misc_feature (123)..(123): N = G, C, A or T
  misc_feature (130)..(130): N = G, C, A or T
  misc_feature (134)..(134): N = G, C, A or T
  misc_feature (135)..(135): N = G, C, A or T
cccnnngnnnncgnggaattgcganttgnaaagcaacntgttgtcatgnagagcaggaaacaaaatntcgtatctcgatctagancntnagcacantacaganntatgnnacaggctgtgngngaggtantcanntatcggtttgta

SEQ ID NO: 334 - DNA, 185 bp, Nicotiana tabacum
  misc_feature (2)..(6): N = G, C, A or T
  misc_feature (8)..(11): N = G, C, A or T
  misc_feature (14)..(14): N = G, C, A or T
  misc_feature (16)..(16): N = G, C, A or T
  misc_feature (29)..(29): N = G, C, A or T
  misc_feature (31)..(31): N = G, C, A or T
  misc_feature (37)..(37): N = G, C, A or T
  misc_feature (45)..(45): N = G, C, A or T
  misc_feature (53)..(54): N = G, C, A or T
  misc_feature (59)..(59): N = G, C, A or T
  misc_feature (65)..(65): N = G, C, A or T
  misc_feature (67)..(67): N = G, C, A or T
  misc_feature (68)..(68): N = G, C, A or T
  misc_feature (71)..(71): N = G, C, A or T
  misc_feature (73)..(73): N = G, C, A or T
  misc_feature (76)..(76): N = G, C, A or T
  misc_feature (81)..(81): N = G, C, A or T
  misc_feature (90)..(90): N = G, C, A or T
  misc_feature (93)..(93): N = G, C, A or T
  misc_feature (107)..(107): N = G, C, A or T
  misc_feature (111)..(111): N = G, C, A or T
  misc_feature (113)..(113): N = G, C, A or T
  misc_feature (129)..(129): N = G, C, A or T
  misc_feature (138)..(138): N = G, C, A or T
  misc_feature (139)..(140): N = G, C, A or T
  misc_feature (149)..(149): N = G, C, A or T
gnnnnncnnnngcngntctgtggtcttgncnttgganattaagcncctacttnntacgntactgnannagncngcntctangagcaagcnacnagccctactactanattnanctactgcctttatgtntaacaaagnnngagcaaganaggaccaacagatgctactagctagagttgatcata

SEQ ID NO: 335 - DNA, 187 bp, Nicotiana tabacum
  misc_feature (5)..(5): N = G, C, A or T
  misc_feature (7)..(10): N = G, C, A or T
  misc_feature (12)..(12): N = G, C, A or T
  misc_feature (48)..(48): N = G, C, A or T
  misc_feature (50)..(50): N = G, C, A or T
taaangnnnngnagcaaggaagctctagcttgaaggatgctgattatnanttttgattagaattttacaaatgtaaagaattatactaatgtaaagaactacgtttgggcttgatccccataggagcttagcccggggtacgtaggcaacctgtgagaaaaggagagatcaggtgcagccccttgta

SEQ ID NO: 336 - DNA, 77 bp, Nicotiana tabacum
  misc_feature (3)..(3): N = G, C, A or T
  misc_feature (9)..(9): N = G, C, A or T
  misc_feature (11)..(11): N = G, C, A or T
  misc_feature (32)..(32): N = G, C, A or T
  misc_feature (34)..(36): N = G, C, A or T
  misc_feature (42)..(42): N = G, C, A or T
  misc_feature (44)..(44): N = G, C, A or T
  misc_feature (73)..(73): N = G, C, A or T
  misc_feature (76)..(76): N = G, C, A or T
acncgaatngnaaaggaacccgaaactatgantnnnaaactngnaattctttgatgctacaaattggcactgnatng

SEQ ID NO: 337 - DNA, 103 bp, Nicotiana tabacum
  misc_feature (2)..(2): N = G, C, A or T
  misc_feature (11)..(12): N = G, C, A or T
  misc_feature (28)..(28): N = G, C, A or T
  misc_feature (30)..(30): N = G, C, A or T
gngtccaattnnggtttacgtgttactntngttttccctgctcatactaagctgtgaagatgatttagtgctatttgagtagcagtggttgtaagccttggga

SEQ ID NO: 338 - DNA, 94 bp, Nicotiana tabacum
  misc_feature (8)..(8): N = G, C, A or T
  misc_feature (15)..(15): N = G, C, A or T
  misc_feature (23)..(23): N = G, C, A or T
  misc_feature (33)..(33): N = G, C, A or T
  misc_feature (47)..(47): N = G, C, A or T
  misc_feature (48)..(48): N = G, C, A or T
  misc_feature (66)..(66): N = G, C, A or T
  misc_feature (92)..(92): N = G, C, A or T
gttgtgtnccattcngcatgctntattacatgngttgtatgaggtgnnactgatcaggaacactanatgactatcaaaaatgtgctttacgnca

SEQ ID NO: 339 - DNA, 52 bp, Nicotiana tabacum
  misc_feature (16)..(16): N = G, C, A or T
  misc_feature (44)..(44): N = G, C, A or T
cattgtcttctttttntttcttcttttggcgaattttcttttgntttcttga

SEQ ID NO: 340 - DNA, 68 bp, Nicotiana tabacum
  misc_feature (13)..(13): N = G, C, A or T
ctgggtgtaagtngaagaaggataatggacaagtgatccaaagcattatagggacgacactttaggca

SEQ ID NO: 341 - DNA, 52 bp, Nicotiana tabacum
  misc_feature (1)..(1): N = G, C, A or T
  misc_feature (16)..(16): N = G, C, A or T
  misc_feature (19)..(19): N = G, C, A or T
  misc_feature (22)..(22): N = G, C, A or T
  misc_feature (25)..(25): N = G, C, A or T
  misc_feature (46)..(46): N = G, C, A or T
  misc_feature (49)..(51): N = G, C, A or T
nggccggagtgggtgnggngangantggatcgttggtgagtggtgngtnnnc

SEQ ID NO: 342 - DNA, 75 bp, Nicotiana tabacum
  misc_feature (21)..(21): N = G, C, A or T
  misc_feature (51)..(51): N = G, C, A or T
  misc_feature (57)..(57): N = G, C, A or T
  misc_feature (65)..(65): N = G, C, A or T
  misc_feature (70)..(70): N = G, C, A or T
  misc_feature (72)..(73): N = G, C, A or T
  misc_feature (75)..(75): N = G, C, A or T
gccgcatacatgcatatccgnggggcagcaggatgcgggaacagttttttnatgggnacccctantgcangnncn

SEQ ID NO: 343 - DNA, 87 bp, Nicotiana tabacum
  misc_feature (6)..(7): N = G, C, A or T
  misc_feature (10)..(10): N = G, C, A or T
  misc_feature (18)..(18): N = G, C, A or T
  misc_feature (24)..(24): N = G, C, A or T
  misc_feature (31)..(31): N = G, C, A or T
  misc_feature (36)..(36): N = G, C, A or T
  misc_feature (41)..(41): N = G, C, A or T
  misc_feature (48)..(48): N = G, C, A or T
  misc_feature (53)..(53): N = G, C, A or T
  misc_feature (55)..(55): N = G, C, A or T
  misc_feature (58)..(58): N = G, C, A or T
  misc_feature (68)..(68): N = G, C, A or T
  misc_feature (71)..(71): N = G, C, A or T
  misc_feature (74)..(74): N = G, C, A or T
aatccnngtntaagattntcagcnttgggcnagagnaagcnctaatcntgatnancantggtgaaccnaantanccagttaccacct

SEQ ID NO: 344 - DNA, 80 bp, Nicotiana tabacum
  misc_feature (14)..(14): N = G, C, A or T
  misc_feature (34)..(34): N = G, C, A or T
  misc_feature (35)..(35): N = G, C, A or T
  misc_feature (54)..(54): N = G, C, A or T
  misc_feature (58)..(59): N = G, C, A or T
  misc_feature (64)..(64): N = G, C, A or T
  misc_feature (67)..(67): N = G, C, A or T
  misc_feature (71)..(71): N = G, C, A or T
  misc_feature (78)..(80): N = G, C, A or T
gctcttctgtaaanggttattttttgactgacanncaagggggtaaatttttanttannaccanaanttgnttaaggnnn

SEQ ID NO: 345 - DNA, 92 bp, Nicotiana tabacum
  misc_feature (53)..(53): N = G, C, A or T
  misc_feature (56)..(56): N = G, C, A or T
acgtacacattctcctcaattgctcaggaaatggtattgggtgcagttgtacnggnaacactacatgactatcaaaaatgtgcttcacgaca

SEQ ID NO: 346 - DNA, 117 bp, Nicotiana tabacum
  misc_feature (11)..(11): N = G, C, A or T
  misc_feature (35)..(35): N = G, C, A or T
  misc_feature (84)..(84): N = G, C, A or T
  misc_feature (103)..(103): N = G, C, A or T
  misc_feature (108)..(108): N = G, C, A or T
  misc_feature (109)..(109): N = G, C, A or T
  misc_feature (112)..(112): N = G, C, A or T
ggtgcgatcgnctgccgaagaagcgttgtacttgnaaaatatcggaggaaatatccctgaaataactgccaacgctggtgcagncaaaaggtactatgttcgntcttnnatntagca

SEQ ID NO: 347 - DNA, 139 bp, Nicotiana tabacum
  misc_feature (1)..(1): N = G, C, A or T
  misc_feature (3)..(3): N = G, C, A or T
  misc_feature (15)..(15): N = G, C, A or T
  misc_feature (21)..(21): N = G, C, A or T
  misc_feature (24)..(24): N = G, C, A or T
  misc_feature (34)..(34): N = G, C, A or T
  misc_feature (36)..(36): N = G, C, A or T
  misc_feature (43)..(43): N = G, C, A or T
  misc_feature (52)..(52): N = G, C, A or T
  misc_feature (71)..(71): N = G, C, A or T
  misc_feature (73)..(74): N = G, C, A or T
  misc_feature (82)..(82): N = G, C, A or T
  misc_feature (88)..(89): N = G, C, A or T
  misc_feature (99)..(99): N = G, C, A or T
  misc_feature (119)..(119): N = G, C, A or T
  misc_feature (122)..(122): N = G, C, A or T
ncngttatagtcganacacanggnatgccctctngnaaacatntattgtacnggatgacgtattctgatantnncttcaaanaaaganncatcactagngagcacgaaagataagtgtnttntctcaaagaaatgacca

SEQ ID NO: 348 - DNA, 181 bp, Nicotiana tabacum
  misc_feature (2)..(2): N = G, C, A or T
  misc_feature (7)..(7): N = G, C, A or T
  misc_feature (10)..(10): N = G, C, A or T
  misc_feature (16)..(16): N = G, C, A or T
  misc_feature (17)..(17): N = G, C, A or T
  misc_feature (19)..(19): N = G, C, A or T
  misc_feature (22)..(22): N = G, C, A or T
  misc_feature (29)..(29): N = G, C, A or T
  misc_feature (32)..(32): N = G, C, A or T
  misc_feature (35)..(36): N = G, C, A or T
  misc_feature (39)..(39): N = G, C, A or T
  misc_feature (44)..(46): N = G, C, A or T
  misc_feature (48)..(48): N = G, C, A or T
  misc_feature (54)..(54): N = G, C, A or T
  misc_feature (56)..(56): N = G, C, A or T
  misc_feature (57)..(57): N = G, C, A or T
  misc_feature (60)..(61): N = G, C, A or T
  misc_feature (63)..(63): N = G, C, A or T
  misc_feature (69)..(69): N = G, C, A or T
  misc_feature (71)..(71): N = G, C, A or T
  misc_feature (78)..(79): N = G, C, A or T
  misc_feature (82)..(82): N = G, C, A or T
  misc_feature (86)..(86): N = G, C, A or T
  misc_feature (88)..(88): N = G, C, A or T
  misc_feature (97)..(97): N = G, C, A or T
  misc_feature (100)..(100): N = G, C, A or T
  misc_feature (106)..(106): N = G, C, A or T
  misc_feature (108)..(108): N = G, C, A or T
  misc_feature (114)..(114): N = G, C, A or T
  misc_feature (118)..(118): N = G, C, A or T
  misc_feature (123)..(123): N = G, C, A or T
  misc_feature (126)..(126): N = G, C, A or T
  misc_feature (131)..(133): N = G, C, A or T
  misc_feature (135)..(136): N = G, C, A or T
  misc_feature (140)..(140): N = G, C, A or T
  misc_feature (144)..(144): N = G, C, A or T
  misc_feature (147)..(147): N = G, C, A or T
  misc_feature (150)..(150): N = G, C, A or T
  misc_feature (156)..(156): N = G, C, A or T
  misc_feature (161)..(162): N = G, C, A or T
  misc_feature (167)..(167): N = G, C, A or T
  misc_feature (172)..(172): N = G, C, A or T
  misc_feature (174)..(174): N = G, C, A or T
  misc_feature (175)..(175): N = G, C, A or T
  misc_feature (178)..(178): N = G, C, A or T
  misc_feature (180)..(180): N = G, C, A or T
tngccgnttnccatgnngnacntggatantcnaannctntccgnnngngctcgngnntanngnccggcnanacaccannccnactntntgtgacgcntgnaggacnanctatgntggnagganttnatagnnngnnccanatcngcnctngacagncactnncctgngactncnntgnanc

SEQ ID NO: 349 - DNA, 228 bp, Nicotiana tabacum
  misc_feature (4)..(4): N = G, C, A or T
  misc_feature (10)..(10): N = G, C, A or T
  misc_feature (23)..(24): N = G, C, A or T
  misc_feature (94)..(94): N = G, C, A or T
  misc_feature (212)..(212): N = G, C, A or T
  misc_feature (218)..(218): N = G, C, A or T
tagnccgctngttcaagagattnngctctggcatctgtaagtgagatatcaaagcgcacttctgaaacccctcaacgagaaaatagaaggaatncaacaaagattgaccaaccattctgtagaagcagaacagaaaagggtgaattgctatcacactcaggaaattttgaatcaataaacgagaatggaaacagaacatgttcccgtactgnattttntcctttcagc

SEQ ID NO: 350 - DNA, 99 bp, Nicotiana tabacum
  misc_feature (7)..(7): N = G, C, A or T
  misc_feature (11)..(11): N = G, C, A or T
  misc_feature (16)..(16): N = G, C, A or T
  misc_feature (34)..(35): N = G, C, A or T
  misc_feature (38)..(38): N = G, C, A or T
  misc_feature (42)..(42): N = G, C, A or T
  misc_feature (48)..(48): N = G, C, A or T
  misc_feature (49)..(49): N = G, C, A or T
  misc_feature (52)..(52): N = G, C, A or T
  misc_feature (60)..(60): N = G, C, A or T
  misc_feature (66)..(66): N = G, C, A or T
  misc_feature (68)..(68): N = G, C, A or T
cccaaantccntcttntacgattactcaggaacnnatnatgngattgnnctngaccgaangccttntncgtgattacctggaaaagctgcagctggaca

SEQ ID NO: 351 - DNA, 44 bp, Nicotiana tabacum
  misc_feature (21)..(21): N = G, C, A or T
  misc_feature (24)..(24): N = G, C, A or T
  misc_feature (26)..(26): N = G, C, A or T
  misc_feature (28)..(28): N = G, C, A or T
  misc_feature (35)..(35): N = G, C, A or T
  misc_feature (37)..(37): N = G, C, A or T
  misc_feature (40)..(40): N = G, C, A or T
tactatgttattgttcgtcanganantntgcaacngntgnccca

SEQ ID NO: 352 - DNA, 81 bp, Nicotiana tabacum
  misc_feature (17)..(17): N = G, C, A or T
  misc_feature (23)..(23): N = G, C, A or T
  misc_feature (26)..(26): N = G, C, A or T
  misc_feature (30)..(31): N = G, C, A or T
  misc_feature (34)..(34): N = G, C, A or T
  misc_feature (37)..(37): N = G, C, A or T
  misc_feature (39)..(39): N = G, C, A or T
  misc_feature (41)..(41): N = G, C, A or T
  misc_feature (45)..(45): N = G, C, A or T
  misc_feature (51)..(51): N = G, C, A or T
  misc_feature (61)..(61): N = G, C, A or T
  misc_feature (65)..(65): N = G, C, A or T
  misc_feature (70)..(71): N = G, C, A or T
gcgagggcctcccaagntgagtntgnagcnnggngtnangnaatnaagagnagaaagaggntcangcggnngaaaatgtaa

SEQ ID NO: 353 - DNA, 90 bp, Nicotiana tabacum
  misc_feature (19)..(19): N = G, C, A or T
  misc_feature (30)..(30): N = G, C, A or T
  misc_feature (36)..(36): N = G, C, A or T
  misc_feature (48)..(48): N = G, C, A or T
  misc_feature (61)..(61): N = G, C, A or T
  misc_feature (64)..(64): N = G, C, A or T
  misc_feature (70)..(70): N = G, C, A or T
  misc_feature (73)..(74): N = G, C, A or T
  misc_feature (83)..(84): N = G, C, A or T
gcgcgggaccctaccgaangggtaatttgnagcagnctcgtacaaaanataggaggagtanaangtaagntcnngcggaagannatgtaa

SEQ ID NO: 354 - DNA, 92 bp, Nicotiana tabacum
  misc_feature (5)..(5): N = G, C, A or T
tgtgnttcttcctgttatggggacttgttggttatttccttttttgtgaagctctggtcgttacctcaaagtgtatgtacttccaaacggaa

SEQ ID NO: 355 - DNA, 58 bp, Nicotiana tabacum
attgtcttctcttttggtttcttttcttttggcgaattttcttttgttttctgcttga

SEQ ID NO: 356 - DNA, 65 bp, Nicotiana tabacum
  misc_feature (48)..(48): N = G, C, A or T
  misc_feature (53)..(53): N = G, C, A or T
aagcactctgttgtgaggtaaggcctagtccccctctctatgtacttnatttntgccatacattt

SEQ ID NO: 357 - DNA, 103 bp, Nicotiana tabacum
  misc_feature (9)..(9): N = G, C, A or T
  misc_feature (25)..(25): N = G, C, A or T
  misc_feature (44)..(44): N = G, C, A or T
  misc_feature (50)..(50): N = G, C, A or T
  misc_feature (54)..(54): N = G, C, A or T
  misc_feature (64)..(64): N = G, C, A or T
  misc_feature (70)..(70): N = G, C, A or T
  misc_feature (77)..(77): N = G, C, A or T
  misc_feature (78)..(78): N = G, C, A or T
  misc_feature (87)..(87): N = G, C, A or T
  misc_feature (92)..(92): N = G, C, A or T
  misc_feature (99)..(99): N = G, C, A or T
ggattcaanccatcgagggtccatngtggtctccggcttacggnctattngtgntcaactattnggtggnccgcatnnttcttgtanactancgggaanatct

SEQ ID NO: 358 - DNA, 103 bp, Nicotiana tabacum
  misc_feature (8)..(8): N = G, C, A or T
  misc_feature (10)..(10): N = G, C, A or T
  misc_feature (15)..(15): N = G, C, A or T
  misc_feature (22)..(22): N = G, C, A or T
  misc_feature (25)..(25): N = G, C, A or T
  misc_feature (30)..(30): N = G, C, A or T
  misc_feature (60)..(60): N = G, C, A or T
  misc_feature (64)..(64): N = G, C, A or T
  misc_feature (79)..(79): N = G, C, A or T
  misc_feature (80)..(80): N = G, C, A or T
  misc_feature (83)..(83): N = G, C, A or T
tgctcagntngatcnaaggggngtnttttnacatggaacagggcaactgcctctacttgntttnatgcctttttcattnngtncatttctagggatcggccgt

SEQ ID NO: 359 - DNA, 222 bp, Nicotiana tabacum
  misc_feature (4)..(7): N = G, C, A or T
  misc_feature (10)..(10): N = G, C, A or T
  misc_feature (13)..(14): N = G, C, A or T
  misc_feature (17)..(17): N = G, C, A or T
  misc_feature (22)..(22): N = G, C, A or T
  misc_feature (29)..(29): N = G, C, A or T
  misc_feature (34)..(34): N = G, C, A or T
  misc_feature (41)..(41): N = G, C, A or T
  misc_feature (45)..(45): N = G, C, A or T
  misc_feature (51)..(51): N = G, C, A or T
  misc_feature (54)..(54): N = G, C, A or T
  misc_feature (61)..(62): N = G, C, A or T
  misc_feature (66)..(66): N = G, C, A or T
  misc_feature (72)..(72): N = G, C, A or T
  misc_feature (80)..(80): N = G, C, A or T
  misc_feature (84)..(84): N = G, C, A or T
  misc_feature (86)..(86): N = G, C, A or T
  misc_feature (90)..(90): N = G, C, A or T
  misc_feature (92)..(92): N = G, C, A or T
  misc_feature (99)..(99): N = G, C, A or T
  misc_feature (102)..(102): N = G, C, A or T
  misc_feature (119)..(119): N = G, C, A or T
  misc_feature (127)..(127): N = G, C, A or T
  misc_feature (159)..(159): N = G, C, A or T
  misc_feature (166)..(166): N = G, C, A or T
  misc_feature (172)..(173): N = G, C, A or T
  misc_feature (183)..(183): N = G, C, A or T
  misc_feature (189)..(189): N = G, C, A or T
  misc_feature (209)..(209): N = G, C, A or T
gatnnnntanccnnggnctatnaacgttnccgangcaggtncgcnatgctntgnccttatnncatngcgaangagtaccngganancccncntggacanacntgagggcagccatgggnaggctganacaaaattctggttcactaatttccatctttnctttttntttatnngccaacacantaactntattggtactagaacatggnattacctttgggt

SEQ ID NO: 360 - DNA, 82 bp, Nicotiana tabacum
  misc_feature (1)..(1): N = G, C, A or T
  misc_feature (8)..(10): N = G, C, A or T
  misc_feature (14)..(14): N = G, C, A or T
  misc_feature (28)..(28): N = G, C, A or T
  misc_feature (53)..(53): N = G, C, A or T
  misc_feature (55)..(56): N = G, C, A or T
  misc_feature (66)..(66): N = G, C, A or T
  misc_feature (71)..(71): N = G, C, A or T
  misc_feature (74)..(74): N = G, C, A or T
  misc_feature (79)..(79): N = G, C, A or T
  misc_feature (82)..(82): N = G, C, A or T
nacgcagnnnaaanacgatgacgaaagnccgccaaaaccactgacttgacacntnnaagattgctngggancanaggangcn

SEQ ID NO: 361 - DNA, 98 bp, Nicotiana tabacum
  misc_feature (4)..(5): N = G, C, A or T
  misc_feature (9)..(9): N = G, C, A or T
  misc_feature (25)..(25): N = G, C, A or T
  misc_feature (36)..(36): N = G, C, A or T
  misc_feature (39)..(39): N = G, C, A or T
  misc_feature (45)..(45): N = G, C, A or T
  misc_feature (48)..(48): N = G, C, A or T
  misc_feature (65)..(65): N = G, C, A or T
  misc_feature (70)..(70): N = G, C, A or T
  misc_feature (76)..(76): N = G, C, A or T
  misc_feature (92)..(92): N = G, C, A or T
tgtnnaaanaaggcgtgccgaggcngacggatgtgncangtgtcncangacgatgttactgaatnggtanttacancgggaatctgtggcgntcatgc

SEQ ID NO: 362 - DNA, 44 bp, Nicotiana tabacum
  misc_feature (4)..(4): N = G, C, A or T
  misc_feature (10)..(10): N = G, C, A or T
  misc_feature (18)..(18): N = G, C, A or T
  misc_feature (23)..(23): N = G, C, A or T
  misc_feature (27)..(27): N = G, C, A or T
  misc_feature (30)..(30): N = G, C, A or T
  misc_feature (32)..(32): N = G, C, A or T
aagncggaangtttgtancccgnaccncananaaattcacattg

SEQ ID NO: 363 - DNA, 73 bp, Nicotiana tabacum
  misc_feature (16)..(16): N = G, C, A or T
ggagcacagcaattcnaaattctttctaccattttggtttcatatctaagtcattccctattgggcttgcgct

SEQ ID NO: 364 - DNA, 61 bp, Nicotiana tabacum
  misc_feature (14)..(15): N = G, C, A or T
  misc_feature (18)..(18): N = G, C, A or T
  misc_feature (23)..(23): N = G, C, A or T
  misc_feature (26)..(26): N = G, C, A or T
  misc_feature (29)..(29): N = G, C, A or T
  misc_feature (31)..(31): N = G, C, A or T
  misc_feature (34)..(34): N = G, C, A or T
  misc_feature (37)..(38): N = G, C, A or T
  misc_feature (41)..(42): N = G, C, A or T
  misc_feature (46)..(46): N = G, C, A or T
  misc_feature (48)..(48): N = G, C, A or T
  misc_feature (49)..(49): N = G, C, A or T
  misc_feature (52)..(52): N = G, C, A or T
gtgggatgctgacnntgnagctnttngtntngtnccnnagnnattncnngcnattaagcat

SEQ ID NO: 365 - DNA, 71 bp, Nicotiana tabacum
  misc_feature (6)..(8): N = G, C, A or T
  misc_feature (14)..(14): N = G, C, A or T
  misc_feature (14)..(14): N = G, C, A or T
  misc_feature (29)..(29): N = G, C, A or T
  misc_feature (31)..(32): N = G, C, A or T
  misc_feature (33)..(33): N = G, C, A or T
  misc_feature (35)..(35): N = G, C, A or T
  misc_feature (38)..(38): N = G, C, A or T
  misc_feature (59)..(59): N = G, C, A or T
cgctannntagcantccgatgtgagggangnnncnagnccccctctttatgaacttgantgctggcataca

SEQ ID NO: 366 - DNA, 85 bp, Nicotiana tabacum
  misc_feature (2)..(2): N = G, C, A or T
  misc_feature (11)..(11): N = G, C, A or T
  misc_feature (16)..(16): N = G, C, A or T
  misc_feature (17)..(17): N = G, C, A or T
  misc_feature (30)..(30): N = G, C, A or T
  misc_feature (41)..(44): N = G, C, A or T
  misc_feature (48)..(48): N = G, C, A or T
  misc_feature (50)..(50): N = G, C, A or T
  misc_feature (59)..(59): N = G, C, A or T
  misc_feature (64)..(64): N = G, C, A or T
  misc_feature (82)..(82): N = G, C, A or T
gnaaagctaangtgannattagcactctgntgggagggtannnnctanantcccctaantatgntacttaattggggccgtncat

SEQ ID NO: 367 - DNA, 85 bp, Nicotiana tabacum
  misc_feature (8)..(9): N = G, C, A or T
  misc_feature (12)..(12): N = G, C, A or T
  misc_feature (15)..(15): N = G, C, A or T
  misc_feature (17)..(17): N = G, C, A or T
  misc_feature (20)..(20): N = G, C, A or T
  misc_feature (26)..(27): N = G, C, A or T
  misc_feature (30)..(30): N = G, C, A or T
  misc_feature (34)..(34): N = G, C, A or T
  misc_feature (36)..(37): N = G, C, A or T
  misc_feature (47)..(47): N = G, C, A or T
  misc_feature (51)..(52): N = G, C, A or T
  misc_feature (63)..(63): N = G, C, A or T
  misc_feature (76)..(76): N = G, C, A or T
  misc_feature (78)..(78): N = G, C, A or T
  misc_feature (80)..(80): N = G, C, A or T
  misc_feature (85)..(85): N = G, C, A or T
gccggctnntgnagngncgntgcttnnttnagtntnntgagcatggncctnnagaaaacgctngtggcatgatgcntnanggggn

SEQ ID NO: 368 - DNA, 106 bp, Nicotiana tabacum
  misc_feature (1)..(3): N = G, C, A or T
  misc_feature (26)..(26): N = G, C, A or T
  misc_feature (37)..(37): N = G, C, A or T
  misc_feature (44)..(44): N = G, C, A or T
  misc_feature (51)..(51): N = G, C, A or T
  misc_feature (60)..(60): N = G, C, A or T
  misc_feature (61)..(61): N = G, C, A or T
  misc_feature (72)..(72): N = G, C, A or T
  misc_feature (75)..(75): N = G, C, A or T
  misc_feature (89)..(89): N = G, C, A or T
  misc_feature (91)..(91): N = G, C, A or T
nnntatccctgctgtgaggagtgttnttccttgtgtnatgcctntatttgngtttccgcnnttgtgctcttntcntaatgtatagattntnactgtagattctcat

SEQ ID NO: 369 - DNA, 91 bp, Nicotiana tabacum
  misc_feature (2)..(2): N = G, C, A or T
  misc_feature (4)..(4): N = G, C, A or T
  misc_feature (8)..(8): N = G, C, A or T
  misc_feature (10)..(11): N = G, C, A or T
  misc_feature (26)..(26): N = G, C, A or T
  misc_feature (86)..(86): N = G, C, A or T
  misc_feature (88)..(88): N = G, C, A or T
gncnggtngnngaactaaagtaagtnggtaggcatggtggcgaatgaacctaaaaagtaaaatctaacttgcaggatcaaacatangntca

SEQ ID NO: 370 - DNA, 103 bp, Nicotiana tabacum
  misc_feature (2)..(2): N = G, C, A or T
  misc_feature (10)..(10): N = G, C, A or T
  misc_feature (35)..(35): N = G, C, A or T
  misc_feature (75)..(75): N = G, C, A or T
  misc_feature (84)..(84): N = G, C, A or T
cncattgtanatcaacctatatgatggacttacgngaagtttccaagacacatgactaaagctgaccaagtctantaggctagntcaagcccgtaccgtgaca

SEQ ID NO: 371 - DNA, 138 bp, Nicotiana tabacum
  misc_feature (13)..(13): N = G, C, A or T
  misc_feature (32)..(32): N = G, C, A or T
  misc_feature (45)..(45): N = G, C, A or T
  misc_feature (48)..(48): N = G, C, A or T
  misc_feature (68)..(68): N = G, C, A or T
  misc_feature (69)..(69): N = G, C, A or T
  misc_feature (84)..(84): N = G, C, A or T
  misc_feature (88)..(89): N = G, C, A or T
  misc_feature (96)..(96): N = G, C, A or T
  misc_feature (103)..(103): N = G, C, A or T
  misc_feature (108)..(108): N = G, C, A or T
  misc_feature (112)..(112): N = G, C, A or T
  misc_feature (118)..(118): N = G, C, A or T
  misc_feature (121)..(122): N = G, C, A or T
  misc_feature (126)..(126): N = G, C, A or T
  misc_feature (128)..(129): N = G, C, A or T
tcgtatttatgcncatgaatgatgtgcagtgntgtgtcctgactnatnggagccgttgtcaaacatgnngtatgagtaggaagnattnnctgctcntctcggncatgnaggnagccanatnngtcngnnagtgcagat

SEQ ID NO: 372 - DNA, 124 bp, Nicotiana tabacum
  misc_feature (1)..(1): N = G, C, A or T
  misc_feature (6)..(6): N = G, C, A or T
  misc_feature (8)..(9): N = G, C, A or T
  misc_feature (11)..(11): N = G, C, A or T
  misc_feature (15)..(15): N = G, C, A or T
  misc_feature (18)..(19): N = G, C, A or T
  misc_feature (20)..(22): N = G, C, A or T
  misc_feature (31)..(31): N = G, C, A or T
  misc_feature (36)..(36): N = G, C, A or T
  misc_feature (38)..(38): N = G, C, A or T
  misc_feature (43)..(44): N = G, C, A or T
  misc_feature (52)..(52): N = G, C, A or T
  misc_feature (54)..(54): N = G, C, A or T
  misc_feature (64)..(64): N = G, C, A or T
  misc_feature (67)..(67): N = G, C, A or T
  misc_feature (74)..(75): N = G, C, A or T
  misc_feature (78)..(78): N = G, C, A or T
  misc_feature (80)..(80): N = G, C, A or T
  misc_feature (85)..(85): N = G, C, A or T
  misc_feature (86)..(86): N = G, C, A or T
  misc_feature (88)..(91): N = G, C, A or T
  misc_feature (94)..(94): N = G, C, A or T
  misc_feature (103)..(103): N = G, C, A or T
  misc_feature (106)..(106): N = G, C, A or T
  misc_feature (110)..(110): N = G, C, A or T
  misc_feature (117)..(117): N = G, C, A or T
  misc_feature (120)..(120): N = G, C, A or T
ncgatncnnangacncannnnngcgaggtgngtaanantttgnnacctttantngctgcactanganatcgacnngcncngtganngnnnnacntgaggaaancanagcnggaatgnctnagta

SEQ ID NO: 373 - DNA, 66 bp, Nicotiana tabacum
aatatggaactggaattatgtatctgtattactcctgttgtaatgcattgacttatacggccttgg

SEQ ID NO: 374 - DNA, 79 bp, Nicotiana tabacum
  misc_feature (14)..(14): N = G, C, A or T
gcttatagtgctgnatttatgctgataaattctgtaacataatagtgaggttgtaatgtagatgttgaagagctacctg

SEQ ID NO: 375 - DNA, 82 bp, Nicotiana tabacum
  misc_feature (2)..(2): N = G, C, A or T
  misc_feature (4)..(4): N = G, C, A or T
  misc_feature (11)..(11): N = G, C, A or T
  misc_feature (14)..(14): N = G, C, A or T
  misc_feature (16)..(16): N = G, C, A or T
  misc_feature (20)..(20): N = G, C, A or T
  misc_feature (24)..(24): N = G, C, A or T
  misc_feature (25)..(25): N = G, C, A or T
gntnaagcagngtngntaanaggnngcattttctagtttcagatttttctgttcttggagcaataacatccatctttctcct

SEQ ID NO: 376 - DNA, 130 bp, Nicotiana tabacum
  misc_feature (6)..(6): N = G, C, A or T
ccgttnccctcaaacacccttgaatcctatcgaatctggatttgaagacgaaccctagaaattccaaaatcctaaatcgagtgttcgttgaatttttccagtctaaattgattttattcgtgtgttcttg

SEQ ID NO: 377 - DNA, 58 bp, Nicotiana tabacum
  misc_feature (5)..(5): N = G, C, A or T
  misc_feature (10)..(10): N = G, C, A or T
  misc_feature (11)..(11): N = G, C, A or T
  misc_feature (25)..(25): N = G, C, A or T
  misc_feature (41)..(42): N = G, C, A or T
  misc_feature (46)..(46): N = G, C, A or T
  misc_feature (52)..(52): N = G, C, A or T
tttgngatanntttagttggatggnatggaatgcttatctnntatncgaaangatggt

SEQ ID NO: 378 - DNA, 91 bp, Nicotiana tabacum
  misc_feature (10)..(10): N = G, C, A or T
  misc_feature (15)..(15): N = G, C, A or T
  misc_feature (18)..(18): N = G, C, A or T
  misc_feature (22)..(23): N = G, C, A or T
  misc_feature (30)..(31): N = G, C, A or T
  misc_feature (40)..(40): N = G, C, A or T
  misc_feature (64)..(64): N = G, C, A or T
  misc_feature (76)..(76): N = G, C, A or T
  misc_feature (91)..(91): N = G, C, A or T
ttgaataacnccagnatnggcnnaatacannccctaatancgaatgatctggtattttacaggnctgacggggggncgcccttttccgtgn

SEQ ID NO: 379 - DNA, 124 bp, Nicotiana tabacum
  misc_feature (9)..(10): N = G, C, A or T
  misc_feature (12)..(12): N = G, C, A or T
  misc_feature (16)..(16): N = G, C, A or T
  misc_feature (24)..(24): N = G, C, A or T
  misc_feature (31)..(31): N = G, C, A or T
  misc_feature (32)..(32): N = G, C, A or T
  misc_feature (42)..(42): N = G, C, A or T
  misc_feature (46)..(46): N = G, C, A or T
  misc_feature (49)..(49): N = G, C, A or T
  misc_feature (50)..(51): N = G, C, A or T
  misc_feature (63)..(63): N = G, C, A or T
  misc_feature (69)..(69): N = G, C, A or T
  misc_feature (73)..(73): N = G, C, A or T
  misc_feature (80)..(81): N = G, C, A or T
  misc_feature (84)..(84): N = G, C, A or T
  misc_feature (87)..(87): N = G, C, A or T
  misc_feature (95)..(95): N = G, C, A or T
  misc_feature (102)..(102): N = G, C, A or T
  misc_feature (106)..(106): N = G, C, A or T
  misc_feature (116)..(116): N = G, C, A or T
tgcttgtannangccnatgctgtntggtggnncgcgcacgtngtgntcnnntgagaggacatntctganttgngccaggnnccngangaagactnccgatanttantgccgaggcncatggggg

SEQ ID NO: 380 - DNA, 125 bp, Nicotiana tabacum
  misc_feature (2)..(2): N = G, C, A or T
  misc_feature (39)..(39): N = G, C, A or T
tntagacccgttttatacaaagcccaaggactgagactntgtacagttgcggaatctgcttgaccccttttacatggttgatacttgtaaccaaacagaacatgctgaaggtgcaaaaggtggag

SEQ ID NO: 381 - DNA, 58 bp, Nicotiana tabacum
  misc_feature (1)..(1): N = G, C, A or T
  misc_feature (15)..(15): N = G, C, A or T
  misc_feature (26)..(26): N = G, C, A or T
  misc_feature (31)..(32): N = G, C, A or T
  misc_feature (45)..(45): N = G, C, A or T
  misc_feature (47)..(49): N = G, C, A or T
  misc_feature (55)..(55): N = G, C, A or T
ngcacggccctcggncttgcaaaaangtggnnacaccctcggggncnnngccagnggg

SEQ ID NO: 382 - DNA, 69 bp, Nicotiana tabacum
  misc_feature (5)..(5): N = G, C, A or T
  misc_feature (7)..(7): N = G, C, A or T
  misc_feature (8)..(8): N = G, C, A or T
  misc_feature (43)..(43): N = G, C, A or T
  misc_feature (54)..(54): N = G, C, A or T
actcnanncccgcgtgctcgcgccagctcccaatgcaaatggnatagaaaaatncaatgctgagcatcg

SEQ ID NO: 383 - DNA, 99 bp, Nicotiana tabacum
  misc_feature (1)..(2): N = G, C, A or T
  misc_feature (5)..(6): N = G, C, A or T
  misc_feature (27)..(27): N = G, C, A or T
  misc_feature (32)..(32): N = G, C, A or T
  misc_feature (65)..(65): N = G, C, A or T
  misc_feature (68)..(68): N = G, C, A or T
  misc_feature (79)..(79): N = G, C, A or T
nnctnnaatgtagctagtacaagtggnagtgngctacacaatatagcttgaccccgacaaaaatnctncacgcactagnaactcatgacatggtatacg

SEQ ID NO: 384 - DNA, 42 bp, Nicotiana tabacum
  misc_feature (3)..(3): N = G, C, A or T
  misc_feature (7)..(7): N = G, C, A or T
  misc_feature (10)..(11): N = G, C, A or T
  misc_feature (14)..(14): N = G, C, A or T
  misc_feature (19)..(20): N = G, C, A or T
  misc_feature (32)..(32): N = G, C, A or T
  misc_feature (35)..(35): N = G, C, A or T
  misc_feature (40)..(40): N = G, C, A or T
cgnagcncgnncgnacacnncgacaaagggancgncacancc

SEQ ID NO: 385 - DNA, 132 bp, Nicotiana tabacum
  misc_feature (10)..(10): N = G, C, A or T
  misc_feature (21)..(21): N = G, C, A or T
  misc_feature (26)..(26): N = G, C, A or T
  misc_feature (28)..(28): N = G, C, A or T
  misc_feature (31)..(31): N = G, C, A or T
  misc_feature (35)..(35): N = G, C, A or T
  misc_feature (74)..(74): N = G, C, A or T
  misc_feature (81)..(81): N = G, C, A or T
  misc_feature (84)..(84): N = G, C, A or T
  misc_feature (109)..(109): N = G, C, A or T
  misc_feature (111)..(111): N = G, C, A or T
  misc_feature (115)..(115): N = G, C, A or T
gccccctgtngctgctccctnagtgntnggncatncagtggtaagcatattggcctgcgccagcatactctaancatggtntgngatagaattccatcacgctactctngnggcncatgaagagcatatccg

SEQ ID NO: 386 - DNA, 155 bp, Nicotiana tabacum
  misc_feature (1)..(1): N = G, C, A or T
  misc_feature (13)..(13): N = G, C, A or T
  misc_feature (32)..(34): N = G, C, A or T
  misc_feature (36)..(37): N = G, C, A or T
  misc_feature (79)..(79): N = G, C, A or T
  misc_feature (83)..(83): N = G, C, A or T
  misc_feature (139)..(139): N = G, C, A or T
  misc_feature (141)..(141): N = G, C, A or T
ntgtagctttctntgtaagcttatgtacctannngnncctgcaccgcccatggctgccggatctgatagctcccaaacnattngtttcaaccacaacccaattcttgccccaaaaccaaccacatcgtagcccaccagntntgttcttctctccg

SEQ ID NO: 387 - DNA, 120 bp, Nicotiana tabacum
  misc_feature (1)..(1): N = G, C, A or T
  misc_feature (4)..(4): N = G, C, A or T
  misc_feature (23)..(23): N = G, C, A or T
  misc_feature (31)..(31): N = G, C, A or T
  misc_feature (35)..(35): N = G, C, A or T
  misc_feature (37)..(37): N = G, C, A or T
  misc_feature (42)..(42): N = G, C, A or T
  misc_feature (70)..(70): N = G, C, A or T
  misc_feature (77)..(77): N = G, C, A or T
  misc_feature (94)..(94): N = G, C, A or T
natnatctccgtgagaaaagacnctaatgantatngnttaancttatgccctatactcattcgacgactnacactgnaataaagccgagtaatngcaaatgcatttatttatactacacc

SEQ ID NO: 388 - DNA, 70 bp, Nicotiana tabacum
  misc_feature (5)..(5): N = G, C, A or T
  misc_feature (9)..(9): N = G, C, A or T
  misc_feature (10)..(10): N = G, C, A or T
  misc_feature (12)..(13): N = G, C, A or T
  misc_feature (15)..(15): N = G, C, A or T
  misc_feature (17)..(17): N = G, C, A or T
  misc_feature (19)..(19): N = G, C, A or T
  misc_feature (21)..(21): N = G, C, A or T
  misc_feature (28)..(28): N = G, C, A or T
  misc_feature (30)..(30): N = G, C, A or T
  misc_feature (41)..(41): N = G, C, A or T
  misc_feature (44)..(45): N = G, C, A or T
ttgantacnntnnantncngnccttccntncaaacaacagnacnntgagaagccataaaaatacagctag

SEQ ID NO: 389 - DNA, 83 bp, Nicotiana tabacum
  misc_feature (5)..(5): N = G, C, A or T
  misc_feature (15)..(15): N = G, C, A or T
  misc_feature (22)..(22): N = G, C, A or T
  misc_feature (24)..(24): N = G, C, A or T
  misc_feature (27)..(27): N = G, C, A or T
  misc_feature (59)..(60): N = G, C, A or T
  misc_feature (74)..(74): N = G, C, A or T
  misc_feature (82)..(82): N = G, C, A or T
gtgtntccttgtgtnatgcctntnttnttgtttccgctattgtactctcatcataatgnntaccatttttctgnagattctna

SEQ ID NO: 390 - DNA, 126 bp, Nicotiana tabacum
  misc_feature (23)..(23): N = G, C, A or T
  misc_feature (27)..(27): N = G, C, A or T
  misc_feature (44)..(44): N = G, C, A or T
  misc_feature (46)..(46): N = G, C, A or T
  misc_feature (48)..(48): N = G, C, A or T
cctcacgtggtctgggacagggnaccncgctgggctggggcatntnanggctcatatcgtggcagaggacatggcactacacgaggtggtcgcggtcgtggaagtagcagtttggggccgtgtcag

SEQ ID NO: 391 - DNA, 130 bp, Nicotiana tabacum
  misc_feature (10)..(10): N = G, C, A or T
  misc_feature (20)..(20): N = G, C, A or T
  misc_feature (44)..(44): N = G, C, A or T
ggcctggtcngtgtacttanacaaagtcccaaggactgagactntgtacagttgcggaatctgcttgaccccttttacatggttgatacttgtaaccaaacagaacatgctgaaggtgcaaaaggtggag

SEQ ID NO: 392 - DNA, 98 bp, Nicotiana tabacum
  misc_feature (8)..(8): N = G, C, A or T
  misc_feature (21)..(21): N = G, C, A or T
  misc_feature (55)..(56): N = G, C, A or T
  misc_feature (67)..(67): N = G, C, A or T
  misc_feature (79)..(79): N = G, C, A or T
  misc_feature (82)..(82): N = G, C, A or T
  misc_feature (84)..(84): N = G, C, A or T
  misc_feature (94)..(94): N = G, C, A or T
  misc_feature (98)..(98): N = G, C, A or T
cttagcancacagctgcttancacaaagataccagcccagggaagttgaatttgnntgtctacagcnaaagccattgcngangnaaagcccctngttn

SEQ ID NO: 393 - DNA, 120 bp, Nicotiana tabacum
  misc_feature (11)..(11): N = G, C, A or T
  misc_feature (23)..(23): N = G, C, A or T
  misc_feature (25)..(25): N = G, C, A or T
  misc_feature (34)..(34): N = G, C, A or T
  misc_feature (39)..(39): N = G, C, A or T
  misc_feature (44)..(44): N = G, C, A or T
  misc_feature (57)..(57): N = G, C, A or T
  misc_feature (65)..(65): N = G, C, A or T
  misc_feature (68)..(68): N = G, C, A or T
  misc_feature (78)..(78): N = G, C, A or T
  misc_feature (90)..(91): N = G, C, A or T
  misc_feature (93)..(93): N = G, C, A or T
  misc_feature (95)..(95): N = G, C, A or T
  misc_feature (102)..(102): N = G, C, A or T
  misc_feature (113)..(113): N = G, C, A or T
  misc_feature (115)..(115): N = G, C, A or T
tacaaaacgtnttcattctttcnantaaatcttntattnttatnagagacatgggtngcccgttnganggagtactgntgttcttcctcnngntnagttgcngaatattgcantngctgc

SEQ ID NO: 394 - DNA, 112 bp, Nicotiana tabacum
  misc_feature (18)..(18): N = G, C, A or T
  misc_feature (22)..(22): N = G, C, A or T
  misc_feature (30)..(30): N = G, C, A or T
  misc_feature (56)..(56): N = G, C, A or T
  misc_feature (89)..(89): N = G, C, A or T
  misc_feature (90)..(90): N = G, C, A or T
  misc_feature (93)..(93): N = G, C, A or T
  misc_feature (103)..(103): N = G, C, A or T
gctctacagaggacaagnactnatatctgnagacaagagggaattgcagcactcangatgtggtagaacggacaagggagtttcctctnntgntcaagtgatntctctcttc

SEQ ID NO: 395 - DNA, 94 bp, Nicotiana tabacum
  misc_feature (5)..(5): N = G, C, A or T
  misc_feature (7)..(7): N = G, C, A or T
  misc_feature (15)..(15): N = G, C, A or T
  misc_feature (28)..(28): N = G, C, A or T
  misc_feature (35)..(35): N = G, C, A or T
  misc_feature (36)..(36): N = G, C, A or T
  misc_feature (38)..(38): N = G, C, A or T
  misc_feature (40)..(40): N = G, C, A or T
  misc_feature (50)..(50): N = G, C, A or T
  misc_feature (51)..(51): N = G, C, A or T
  misc_feature (54)..(54): N = G, C, A or T
  misc_feature (58)..(58): N = G, C, A or T
  misc_feature (60)..(60): N = G, C, A or T
  misc_feature (63)..(63): N = G, C, A or T
  misc_feature (74)..(76): N = G, C, A or T
  misc_feature (79)..(79): N = G, C, A or T
  misc_feature (85)..(86): N = G, C, A or T
ccttngntaggccgncgaccttcagganaacctcnntncnggagaccgtnnctntcgncntgntgatggccatnnnttnaaacgnnttgtgatg

SEQ ID NO: 396 - DNA, 246 bp, Nicotiana tabacum
  misc_feature (14)..(14): N = G, C, A or T
tgtagtgaggagantgaggctgcagatgaggtggctggtaaaatctgtgatgaatttgattcaacggtagtgaatagtcatgtcaaaagactaccacttgctgatgtaactgattcatatctgaatcttcctgcttcaatctctgcagctgagaggtctcatgctaggggaagtctggattctgtcaagacagatgctagctgcactgggcatcataataaagccaaaagaaagcttggaagtagc

SEQ ID NO: 397 - DNA, 314 bp, Nicotiana tabacum
  misc_feature (8)..(8): N = G, C, A or T
  misc_feature (21)..(21): N = G, C, A or T
  misc_feature (23)..(23): N = G, C, A or T
  misc_feature (26)..(26): N = G, C, A or T
  misc_feature (29)..(29): N = G, C, A or T
  misc_feature (35)..(35): N = G, C, A or T
  misc_feature (311)..(311): N = G, C, A or T
  misc_feature (313)..(313): N = G, C, A or T
gcaatctnaactcccgacttngntgngtnctgatntctgctgttgaatcggctgtttggtggctgaactcagaccatcattttggtccatttctttgatgttgttctgcttgtagttgtcctgaagtatttatggaagttgattcaagtctaatagtggcctttactctgcattttagctgtcctgaagaatttatggaagttgattcaagtcaaatagtggcctttactctgcattttaggtacgtacaggtcaactgtaattctctgttgcatttctaaatgaaaatatgggttatcttgtcatgtttngng

SEQ ID NO: 398 - DNA, 51 bp, Nicotiana tabacum
  misc_feature (6)..(6): N = G, C, A or T
  misc_feature (12)..(12): N = G, C, A or T
  misc_feature (13)..(13): N = G, C, A or T
  misc_feature (15)..(16): N = G, C, A or T
  misc_feature (24)..(24): N = G, C, A or T
  misc_feature (31)..(31): N = G, C, A or T
  misc_feature (44)..(44): N = G, C, A or T
ttttangcaagnntnncctcccangaacaancccttagtccagnttcaaag

SEQ ID NO: 399 - DNA, 141 bp, Nicotiana tabacum
  misc_feature (6)..(6): N = G, C, A or T
  misc_feature (10)..(10): N = G, C, A or T
  misc_feature (25)..(25): N = G, C, A or T
  misc_feature (27)..(27): N = G, C, A or T
  misc_feature (32)..(32): N = G, C, A or T
  misc_feature (36)..(36): N = G, C, A or T
  misc_feature (44)..(44): N = G, C, A or T
  misc_feature (46)..(46): N = G, C, A or T
  misc_feature (49)..(49): N = G, C, A or T
  misc_feature (53)..(53): N = G, C, A or T
  misc_feature (56)..(56): N = G, C, A or T
  misc_feature (58)..(63): N = G, C, A or T
  misc_feature (68)..(68): N = G, C, A or T
  misc_feature (70)..(72): N = G, C, A or T
  misc_feature (76)..(76): N = G, C, A or T
  misc_feature (78)..(78): N = G, C, A or T
  misc_feature (81)..(81): N = G, C, A or T
  misc_feature (84)..(84): N = G, C, A or T
  misc_feature (89)..(89): N = G, C, A or T
  misc_feature (94)..(94): N = G, C, A or T
  misc_feature (105)..(105): N = G, C, A or T
  misc_feature (129)..(129): N = G, C, A or T
  misc_feature (133)..(133): N = G, C, A or T
ttttangagnaactaaatccccttntnccgancccntgcaaaangnggnctanacngnnnnnntgagngnnnaatncnaanatnaaacnctgcnttcattctttncctactgatatgagactgtcaatnctgncagggcac

SEQ ID NO: 400 - DNA, 157 bp, Nicotiana tabacum
  misc_feature (3)..(3): N = G, C, A or T
  misc_feature (6)..(6): N = G, C, A or T
  misc_feature (19)..(19): N = G, C, A or T
  misc_feature (32)..(32): N = G, C, A or T
  misc_feature (42)..(42): N = G, C, A or T
  misc_feature (62)..(62): N = G, C, A or T
  misc_feature (67)..(67): N = G, C, A or T
  misc_feature (68)..(69): N = G, C, A or T
  misc_feature (74)..(74): N = G, C, A or T
  misc_feature (78)..(78): N = G, C, A or T
  misc_feature (81)..(81): N = G, C, A or T
  misc_feature (87)..(87): N = G, C, A or T
  misc_feature (96)..(96): N = G, C, A or T
  misc_feature (97)..(97): N = G, C, A or T
  misc_feature (118)..(118): N = G, C, A or T
  misc_feature (123)..(123): N = G, C, A or T
  misc_feature (129)..(129): N = G, C, A or T
  misc_feature (140)..(140): N = G, C, A or T
ttnttnggctcgtcagggngattcttcctgcntatgctgatnatgagttgaccgatgttcantgttnnntaganctgnccnagtccnggcaatgtnncaagtatatagtggcactgcncggtnttatgncaacatcaatnctgcgaaaagcttcacc

SEQ ID NO: 401 - DNA, 273 bp, Nicotiana tabacum
  misc_feature (1)..(3): N = G, C, A or T
  misc_feature (8)..(8): N = G, C, A or T
  misc_feature (16)..(16): N = G, C, A or T
  misc_feature (26)..(26): N = G, C, A or T
  misc_feature (41)..(41): N = G, C, A or T
  misc_feature (44)..(44): N = G, C, A or T
  misc_feature (46)..(46): N = G, C, A or T
  misc_feature (57)..(57): N = G, C, A or T
  misc_feature (59)..(59): N = G, C, A or T
  misc_feature (69)..(69): N = G, C, A or T
  misc_feature (78)..(78): N = G, C, A or T
  misc_feature (79)..(79): N = G, C, A or T
  misc_feature (85)..(85): N = G, C, A or T
  misc_feature (106)..(106): N = G, C, A or T
  misc_feature (109)..(109): N = G, C, A or T
  misc_feature (112)..(112): N = G, C, A or T
  misc_feature (122)..(122): N = G, C, A or T
  misc_feature (126)..(126): N = G, C, A or T
  misc_feature (127)..(127): N = G, C, A or T
  misc_feature (142)..(142): N = G, C, A or T
  misc_feature (146)..(146): N = G, C, A or T
  misc_feature (149)..(149): N = G, C, A or T
  misc_feature (151)..(151): N = G, C, A or T
  misc_feature (160)..(161): N = G, C, A or T
  misc_feature (168)..(168): N = G, C, A or T
  misc_feature (170)..(171): N = G, C, A or T
  misc_feature (174)..(174): N = G, C, A or T
  misc_feature (179)..(179): N = G, C, A or T
  misc_feature (181)..(181): N = G, C, A or T
  misc_feature (183)..(183): N = G, C, A or T
  misc_feature (185)..(186): N = G, C, A or T
  misc_feature (192)..(192): N = G, C, A or T
  misc_feature (248)..(248): N = G, C, A or T
nnncactnctaaagcnctctcctaangacccccaagaggangcntntactagacatncnactcaggcgngatccgcanncctganccgcgtatagctggtatgatnggncanccaaggattntggnntacgagggccgttangtgnganangcacaatgnnggacaananntgnacctnangngnnacaacncaacccaaaggctaactatgcgaaccagacacacctactaacgctctactatgtgncacaagctgtgcggtacgacaaggc

SEQ ID NO: 402 - DNA, 33 bp, Nicotiana tabacum
  misc_feature (1)..(1): N = G, C, A or T
  misc_feature (15)..(15): N = G, C, A or T
  misc_feature (18)..(18): N = G, C, A or T
  misc_feature (25)..(25): N = G, C, A or T
  misc_feature (27)..(27): N = G, C, A or T
  misc_feature (29)..(29): N = G, C, A or T
nggcgtggtggctgnaangggtctnangntgcc

SEQ ID NO: 403 - DNA, 49 bp, Nicotiana tabacum
  misc_feature (9)..(9): N = G, C, A or T
  misc_feature (21)..(21): N = G, C, A or T
  misc_feature (26)..(26): N = G, C, A or T
  misc_feature (37)..(37): N = G, C, A or T
  misc_feature (44)..(44): N = G, C, A or T
  misc_feature (46)..(46): N = G, C, A or T
  misc_feature (47)..(47): N = G, C, A or T
ttctcaggnaggcgggggtgncatcnctgaacaccanaggcagntnncc

SEQ ID NO: 404 - DNA, 48 bp, Nicotiana tabacum
  misc_feature (15)..(15): N = G, C, A or T
  misc_feature (27)..(27): N = G, C, A or T
  misc_feature (31)..(31): N = G, C, A or T
  misc_feature (38)..(38): N = G, C, A or T
  misc_feature (43)..(43): N = G, C, A or T
  misc_feature (46)..(46): N = G, C, A or T
aacctcttttctagnaaccactctctnaatntgtggtnggcgnttnca

SEQ ID NO: 405 - DNA, 64 bp, Nicotiana tabacum
  misc_feature (4)..(4): N = G, C, A or T
  misc_feature (6)..(6): N = G, C, A or T
  misc_feature (8)..(9): N = G, C, A or T
  misc_feature (11)..(11): N = G, C, A or T
  misc_feature (14)..(14): N = G, C, A or T
  misc_feature (21)..(21): N = G, C, A or T
  misc_feature (23)..(23): N = G, C, A or T
  misc_feature (27)..(27): N = G, C, A or T
  misc_feature (30)..(30): N = G, C, A or T
  misc_feature (32)..(33): N = G, C, A or T
  misc_feature (38)..(38): N = G, C, A or T
  misc_feature (51)..(51): N = G, C, A or T
  misc_feature (55)..(55): N = G, C, A or T
  misc_feature (57)..(57): N = G, C, A or T
accncnanncntcngaggganangccnacntnntggcngtgggcccggaantgtncnaatataa

SEQ ID NO: 406 - DNA, 243 bp, Nicotiana tabacum
  misc_feature (11)..(11): N = G, C, A or T
  misc_feature (14)..(15): N = G, C, A or T
  misc_feature (27)..(27): N = G, C, A or T
  misc_feature (28)..(29): N = G, C, A or T
  misc_feature (31)..(31): N = G, C, A or T
  misc_feature (35)..(37): N = G, C, A or T
  misc_feature (43)..(43): N = G, C, A or T
  misc_feature (50)..(50): N = G, C, A or T
  misc_feature (51)..(51): N = G, C, A or T
  misc_feature (53)..(53): N = G, C, A or T
  misc_feature (61)..(61): N = G, C, A or T
  misc_feature (65)..(65): N = G, C, A or T
  misc_feature (67)..(67): N = G, C, A or T
  misc_feature (69)..(69): N = G, C, A or T
  misc_feature (70)..(70): N = G, C, A or T
  misc_feature (72)..(72): N = G, C, A or T
  misc_feature (75)..(75): N = G, C, A or T
  misc_feature (78)..(78): N = G, C, A or T
  misc_feature (82)..(84): N = G, C, A or T
  misc_feature (86)..(86): N = G, C, A or T
  misc_feature (90)..(90): N = G, C, A or T
  misc_feature (98)..(98): N = G, C, A or T
  misc_feature (105)..(105): N = G, C, A or T
  misc_feature (108)..(108): N = G, C, A or T
  misc_feature (110)..(110): N = G, C, A or T
  misc_feature (112)..(112): N = G, C, A or T
  misc_feature (118)..(118): N = G, C, A or T
  misc_feature (121)..(121): N = G, C, A or T
  misc_feature (123)..(123): N = G, C, A or T
  misc_feature (129)..(129): N = G, C, A or T
  misc_feature (130)..(130): N = G, C, A or T
  misc_feature (133)..(136): N = G, C, A or T
  misc_feature (141)..(144): N = G, C, A or T
  misc_feature (146)..(147): N = G, C, A or T
  misc_feature (151)..(151): N = G, C, A or T
  misc_feature (153)..(153): N = G, C, A or T
  misc_feature (155)..(155): N = G, C, A or T
  misc_feature (162)..(162): N = G, C, A or T
  misc_feature (164)..(164): N = G, C, A or T
  misc_feature (169)..(169): N = G, C, A or T
  misc_feature (171)..(171): N = G, C, A or T
  misc_feature (175)..(175): N = G, C, A or T
  misc_feature (191)..(191): N = G, C, A or T
  misc_feature (197)..(197): N = G, C, A or T
  misc_feature (204)..(204): N = G, C, A or T
  misc_feature (230)..(230): N = G, C, A or T
tgccggggttntcnnacaagaatgccnnncnctgnnncgtgtntgtctgnncncatatgcngganangnncntgnccnaaannngncatngtgccttncagtagnatnancngatcanctntnagagtnnccnnnncaggnnnncnncagntngntagtgtntntgctntngatntgaccttactataaanatgaancggcacnaccataaggtataaatgtaggcacantgcttgctctata

SEQ ID NO: 407 - DNA, 273 bp, Nicotiana tabacum
  misc_feature (23)..(23): N = G, C, A or T
  misc_feature (44)..(44): N = G, C, A or T
  misc_feature (47)..(47): N = G, C, A or T
  misc_feature (54)..(54): N = G, C, A or T
  misc_feature (64)..(64): N = G, C, A or T
  misc_feature (68)..(68): N = G, C, A or T
  misc_feature (69)..(69): N = G, C, A or T
  misc_feature (70)..(70): N = G, C, A or T
  misc_feature (72)..(72): N = G, C, A or T
  misc_feature (94)..(94): N = G, C, A or T
  misc_feature (103)..(103): N = G, C, A or T
  misc_feature (159)..(159): N = G, C, A or T
ctcggtgaatgcaccatcctcanttcaaagtggttgctatggtntancagacancatatcggtnacannntncgaattgaacgaagaatttggnggtaaactntgtcagcagagcatgaatgctggtttgtctagtggagttgaggttattgatgtttntactcctccatgctacaaggtaagtggagacagcaagaaaagaagactttctacggcttgtcttgaaattattgatttgacagactcacctatttttgtctgatgtaactaata

SEQ ID NO: 408 - DNA, 37 bp, Nicotiana tabacum
  misc_feature (4)..(4): N = G, C, A or T
  misc_feature (18)..(18): N = G, C, A or T
  misc_feature (20)..(20): N = G, C, A or T
  misc_feature (27)..(27): N = G, C, A or T
  misc_feature (32)..(32): N = G, C, A or T
tganagaatgggttctantnaggaacnatgtnttgta

SEQ ID NO: 409 - DNA, 118 bp, Nicotiana tabacum
  misc_feature (5)..(5): N = G, C, A or T
  misc_feature (12)..(12): N = G, C, A or T
  misc_feature (14)..(14): N = G, C, A or T
  misc_feature (21)..(21): N = G, C, A or T
  misc_feature (40)..(40): N = G, C, A or T
  misc_feature (45)..(45): N = G, C, A or T
  misc_feature (55)..(55): N = G, C, A or T
  misc_feature (70)..(70): N = G, C, A or T
  misc_feature (77)..(77): N = G, C, A or T
  misc_feature (78)..(78): N = G, C, A or T
  misc_feature (84)..(84): N = G, C, A or T
actcncagttgngnggtgcgnagtaaacaactaacaagantgcgnaagcattcangaggacccactgtangcttatnncatctngatcaaaatcagaatgaagttatttctactcttg

SEQ ID NO: 410 - DNA, 75 bp, Nicotiana tabacum
  misc_feature (4)..(4): N = G, C, A or T
  misc_feature (20)..(20): N = G, C, A or T
  misc_feature (24)..(24): N = G, C, A or T
  misc_feature (40)..(40): N = G, C, A or T
  misc_feature (51)..(51): N = G, C, A or T
  misc_feature (55)..(55): N = G, C, A or T
  misc_feature (66)..(66): N = G, C, A or T
  misc_feature (72)..(72): N = G, C, A or T
tggnagcgccgcgtagcganaggnactatagcctggggtngtatagacacntatnggctggcacancttctnaca

SEQ ID NO: 411 - DNA, 102 bp, Nicotiana tabacum
  misc_feature (2)..(3): N = G, C, A or T
  misc_feature (12)..(12): N = G, C, A or T
  misc_feature (22)..(22): N = G, C, A or T
  misc_feature (30)..(30): N = G, C, A or T
  misc_feature (33)..(33): N = G, C, A or T
  misc_feature (38)..(38): N = G, C, A or T
  misc_feature (63)..(63): N = G, C, A or T
  misc_feature (66)..(66): N = G, C, A or T
  misc_feature (87)..(87): N = G, C, A or T
  misc_feature (96)..(96): N = G, C, A or T
  misc_feature (99)..(99): N = G, C, A or T
tnncattgaatngccctacatntaccaatntgnaatcnactgatacttctcaaaacatatcantgncttgcccacttcattacgggnttgtatganaancca

SEQ ID NO: 412 - DNA, 256 bp, Nicotiana tabacum
  misc_feature (15)..(15): N = G, C, A or T
  misc_feature (23)..(23): N = G, C, A or T
  misc_feature (30)..(30): N = G, C, A or T
  misc_feature (40)..(40): N = G, C, A or T
  misc_feature (49)..(49): N = G, C, A or T
  misc_feature (67)..(67): N = G, C, A or T
  misc_feature (68)..(68): N = G, C, A or T
  misc_feature (75)..(75): N = G, C, A or T
  misc_feature (85)..(85): N = G, C, A or T
  misc_feature (97)..(97): N = G, C, A or T
  misc_feature (99)..(99): N = G, C, A or T
  misc_feature (104)..(104): N = G, C, A or T
  misc_feature (134)..(134): N = G, C, A or T
  misc_feature (173)..(173): N = G, C, A or T
  misc_feature (179)..(179): N = G, C, A or T
  misc_feature (182)..(182): N = G, C, A or T
  misc_feature (186)..(186): N = G, C, A or T
  misc_feature (192)..(192): N = G, C, A or T
  misc_feature (197)..(197): N = G, C, A or T
  misc_feature (222)..(222): N = G, C, A or T
  misc_feature (254)..(254): N = G, C, A or T
ttcccggcctggttnccctactnatactcnaccatacccnagaaacccntaacctaattcttcattnnctctccncatatcatcntcaaatactctntncacanattcgttccttctacaactccatcactttntccctctcgccaccgttccaagtattgcacatgggtganagctgnttnatgntctgtngctgngacagatgaacaacaccatatcgcnagtaatggactagtacacaaagaatatgctgncc

SEQ ID NO: 413 - DNA, 25 bp, Nicotiana tabacum
  misc_feature (3)..(3): N = G, C, A or T
  misc_feature (5)..(5): N = G, C, A or T
  misc_feature (11)..(12): N = G, C, A or T
ctnantggcgnnatcagtgctcaca

SEQ ID NO: 414 - DNA, 36 bp, Nicotiana tabacum
  misc_feature (9)..(9): N = G, C, A or T
  misc_feature (34)..(34): N = G, C, A or T
gttcttttngcaactttgatcgggaaagggctcnca

SEQ ID NO: 415 - DNA, 74 bp, Nicotiana tabacum
  misc_feature (1)..(1): N = G, C, A or T
ntacttctgttttctttttgtgtcaaatattgtttgaactctgggttttctaccacgtgccacggtaccactga

SEQ ID NO: 416 - DNA, 127 bp, Nicotiana tabacum
  misc_feature (69)..(69): N = G, C, A or T
  misc_feature (77)..(77): N = G, C, A or T
tgcaataatgaacaaagcaagatatcagtagtgatatctttgttttagagcatctttgtttagctgctntccactanctacaaaattgaatattgcaacatttgtaaccttatttttatcttggcaa

SEQ ID NO: 417 - DNA, 166 bp, Nicotiana tabacum
  misc_feature (11)..(11): N = G, C, A or T
  misc_feature (104)..(105): N = G, C, A or T
tcccttgtttnatggagccgattactttatgagaatgctcagaaacttcaagcaatcgagacagataatcgcaggcaacgagcagctctggtgaccttacaggnnaaggtagatgctgttgcttacccaagaggaactctgggtgaaaaatacgtgcatacttcca

SEQ ID NO: 418 - DNA, 177 bp, Nicotiana tabacum
  misc_feature (6)..(7): N = G, C, A or T
  misc_feature (9)..(9): N = G, C, A or T
  misc_feature (25)..(25): N = G, C, A or T
  misc_feature (27)..(27): N = G, C, A or T
  misc_feature (30)..(30): N = G, C, A or T
  misc_feature (66)..(66): N = G, C, A or T
  misc_feature (67)..(67): N = G, C, A or T
  misc_feature (69)..(69): N = G, C, A or T
  misc_feature (72)..(73): N = G, C, A or T
  misc_feature (76)..(76): N = G, C, A or T
  misc_feature (78)..(79): N = G, C, A or T
  misc_feature (84)..(84): N = G, C, A or T
  misc_feature (86)..(86): N = G, C, A or T
  misc_feature (90)..(90): N = G, C, A or T
  misc_feature (93)..(93): N = G, C, A or T
  misc_feature (96)..(98): N = G, C, A or T
  misc_feature (102)..(102): N = G, C, A or T
  misc_feature (114)..(115): N = G, C, A or T
  misc_feature (124)..(124): N = G, C, A or T
  misc_feature (128)..(128): N = G, C, A or T
  misc_feature (129)..(129): N = G, C, A or T
  misc_feature (138)..(138): N = G, C, A or T
  misc_feature (141)..(141): N = G, C, A or T
  misc_feature (144)..(145): N = G, C, A or T
  misc_feature (147)..(148): N = G, C, A or T
  misc_feature (151)..(151): N = G, C, A or T
  misc_feature (153)..(153): N = G, C, A or T
  misc_feature (154)..(154): N = G, C, A or T
  misc_feature (157)..(157): N = G, C, A or T
accccnntntaaaggggccaaaggnanaanctgcaatcattattcgattgaaacaatcctgcgatnnanacnnganannctgananatgnctnaannnaaanatttgtgctgannggggtgctnttcnncatgaggantanatnntnncancnnctnaagcttctttccatactgga

SEQ ID NO: 419 - DNA, 48 bp, Nicotiana tabacum
  misc_feature (14)..(14): N = G, C, A or T
  misc_feature (21)..(21): N = G, C, A or T
  misc_feature (41)..(41): N = G, C, A or T
ttgcgtggcagttnggggcanaggcactggagacaagggcnactccaa

SEQ ID NO: 420 - DNA, 73 bp, Nicotiana tabacum
aagcaaccttgaatcagactcctcactgatctctccttctcgtcactgtttctgtgtgtgtgtgtgtgtgtgt

SEQ ID NO: 421 - DNA, 194 bp, Nicotiana tabacum
gaatatggaagattccgaaaaagtgtcaatagatggcaaaaatcacaatgggcatgcaaaatatagtttcaagaacacaaatcggaggaagatgtttggtcaccctgaaaaatttagttcagtggaaactgcgatgtctagaataaagaataagagtcatagaccagctgatagtgatggagagggtggaatgt

SEQ ID NO: 422 - DNA, 26 bp, Nicotiana tabacum
  misc_feature (2)..(2): N = G, C, A or T
  misc_feature (6)..(6): N = G, C, A or T
  misc_feature (8)..(8): N = G, C, A or T
  misc_feature (13)..(13): N = G, C, A or T
  misc_feature (19)..(19): N = G, C, A or T
  misc_feature (22)..(22): N = G, C, A or T
tnaaananaatgnattccnctngggt

SEQ ID NO: 423 - DNA, 53 bp, Nicotiana tabacum
  misc_feature (15)..(15): N = G, C, A or T
gaattctttggtgtncatgcgaattacgcgttcagttcttattgggctcacgt

SEQ ID NO: 424 - DNA, 73 bp, Nicotiana tabacum
  misc_feature (12)..(12): N = G, C, A or T
  misc_feature (17)..(17): N = G, C, A or T
  misc_feature (20)..(20): N = G, C, A or T
  misc_feature (21)..(21): N = G, C, A or T
  misc_feature (24)..(24): N = G, C, A or T
  misc_feature (28)..(28): N = G, C, A or T
  misc_feature (38)..(38): N = G, C, A or T
aggatacaaaancgaanccnntgngtgnctacactgcngaactgcgtcgttgcagggtcttattgggctcagt

SEQ ID NO: 425 - DNA, 135 bp, Nicotiana tabacum
  misc_feature (1)..(1): N = G, C, A or T
naacaatttgaaataatatatttcgtcaatgcagcttgcaagctgcagagaggagagtcattatagtaactttataacttttgtttcagtttacaaaccttgtaaattttgaccatattgaagttctcccttcag

SEQ ID NO: 426 - DNA, 91 bp, Nicotiana tabacum
  misc_feature (8)..(8): N = G, C, A or T
  misc_feature (24)..(24): N = G, C, A or T
  misc_feature (36)..(36): N = G, C, A or T
  misc_feature (42)..(42): N = G, C, A or T
  misc_feature (62)..(62): N = G, C, A or T
  misc_feature (66)..(67): N = G, C, A or T
  misc_feature (75)..(75): N = G, C, A or T
gcacattntcacatctttactaanataagaagattnctgtancatctactaagatattgcanaatnntatcagcnagagtgttgacgccgc

SEQ ID NO: 427 - DNA, 194 bp, Nicotiana tabacum
  misc_feature (20)..(20): N = G, C, A or T
  misc_feature (25)..(25): N = G, C, A or T
  misc_feature (27)..(27): N = G, C, A or T
  misc_feature (29)..(29): N = G, C, A or T
  misc_feature (44)..(44): N = G, C, A or T
  misc_feature (46)..(46): N = G, C, A or T
  misc_feature (55)..(56): N = G, C, A or T
  misc_feature (60)..(61): N = G, C, A or T
  misc_feature (67)..(67): N = G, C, A or T
  misc_feature (72)..(72): N = G, C, A or T
  misc_feature (74)..(74): N = G, C, A or T
  misc_feature (80)..(80): N = G, C, A or T
  misc_feature (82)..(86): N = G, C, A or T
  misc_feature (90)..(90): N = G, C, A or T
  misc_feature (92)..(92): N = G, C, A or T
  misc_feature (96)..(97): N = G, C, A or T
  misc_feature (99)..(100): N = G, C, A or T
  misc_feature (102)..(102): N = G, C, A or T
  misc_feature (105)..(105): N = G, C, A or T
  misc_feature (111)..(111): N = G, C, A or T
  misc_feature (114)..(114): N = G, C, A or T
  misc_feature (115)..(115): N = G, C, A or T
  misc_feature (137)..(137): N = G, C, A or T
  misc_feature (144)..(144): N = G, C, A or T
  misc_feature (156)..(156): N = G, C, A or T
gagactttcaattgcgtgcntgctntnancaagccgcgagacantnctaatactnngacnngctggnaatgngncatctngnnnnnctantnaganncnnangcncacaangtnnactgtgtccttctggctgatgncttcccnagcattacgtgntgtctgcggcctgaataagatactgcctctgcaaatcc

SEQ ID NO: 428 - DNA, 280 bp, Nicotiana tabacum
  misc_feature (7)..(7): N = G, C, A or T
  misc_feature (14)..(14): N = G, C, A or T
  misc_feature (35)..(36): N = G, C, A or T
  misc_feature (56)..(56): N = G, C, A or T
  misc_feature (58)..(59): N = G, C, A or T
  misc_feature (61)..(61): N = G, C, A or T
  misc_feature (64)..(64): N = G, C, A or T
  misc_feature (68)..(68): N = G, C, A or T
  misc_feature (70)..(70): N = G, C, A or T
  misc_feature (73)..(73): N = G, C, A or T
  misc_feature (79)..(82): N = G, C, A or T
  misc_feature (89)..(89): N = G, C, A or T
  misc_feature (92)..(92): N = G, C, A or T
  misc_feature (100)..(100): N = G, C, A or T
  misc_feature (103)..(103): N = G, C, A or T
  misc_feature (105)..(106): N = G, C, A or T
  misc_feature (109)..(109): N = G, C, A or T
  misc_feature (112)..(112): N = G, C, A or T
  misc_feature (114)..(114): N = G, C, A or T
  misc_feature (122)..(125): N = G, C, A or T
  misc_feature (127)..(127): N = G, C, A or T
  misc_feature (132)..(133): N = G, C, A or T
  misc_feature (135)..(135): N = G, C, A or T
  misc_feature (140)..(140): N = G, C, A or T
  misc_feature (147)..(147): N = G, C, A or T
  misc_feature (149)..(150): N = G, C, A or T
  misc_feature (153)..(153): N = G, C, A or T
  misc_feature (162)..(162): N = G, C, A or T
  misc_feature (165)..(166): N = G, C, A or T
  misc_feature (168)..(168): N = G, C, A or T
  misc_feature (171)..(172): N = G, C, A or T
  misc_feature (178)..(178): N = G, C, A or T
  misc_feature (196)..(197): N = G, C, A or T
  misc_feature (199)..(199): N = G, C, A or T
  misc_feature (201)..(201): N = G, C, A or T
  misc_feature (203)..(203): N = G, C, A or T
  misc_feature (209)..(209): N = G, C, A or T
  misc_feature (217)..(217): N = G, C, A or T
  misc_feature (220)..(220): N = G, C, A or T
  misc_feature (222)..(222): N = G, C, A or T
  misc_feature (225)..(225): N = G, C, A or T
  misc_feature (234)..(234): N = G, C, A or T
  misc_feature (237)..(237): N = G, C, A or T
  misc_feature (244)..(244): N = G, C, A or T
  misc_feature (247)..(247): N = G, C, A or T
  misc_feature (253)..(253): N = G, C, A or T
  misc_feature (257)..(257): N = G, C, A or T
  misc_feature (277)..(277): N = G, C, A or T
cctgctnattgganggagcactgagggtggtactnnttgcaggaaaatgcctgtcntnngnacncaantncangcccgnnnngcacgangtngatgcggnacnanngcngcntnatatctgnnnngnatcgnnangtgtnacacgcnannganagcaccggntanntnttnnatcctntgccggtgtacctttganntnanantcctcntgttaccngangncangtgcttctnctnagcttgntanttgaantggngtgagaatgaatgaccagcngct

SEQ ID NO: 429 - DNA, 19 bp, Nicotiana tabacum
  misc_feature (1)..(1): N = G, C, A or T
  misc_feature (4)..(4): N = G, C, A or T
  misc_feature (6)..(6): N = G, C, A or T
  misc_feature (18)..(18): N = G, C, A or T
nagntntaattactcggnc

SEQ ID NO: 430 - DNA, 44 bp, Nicotiana tabacum
  misc_feature (6)..(7): N = G, C, A or T
  misc_feature (16)..(16): N = G, C, A or T
  misc_feature (18)..(18): N = G, C, A or T
  misc_feature (22)..(22): N = G, C, A or T
ttttanncagtataantncctnccccttaaaccccccactggac

SEQ ID NO: 431 - DNA, 35 bp, Nicotiana tabacum
  misc_feature (4)..(4): N = G, C, A or T
  misc_feature (12)..(12): N = G, C, A or T
tggnactttctnctcttcaaaagctttgactctct

SEQ ID NO: 432 - DNA, 46 bp, Nicotiana tabacum
  misc_feature (8)..(10): N = G, C, A or T
  misc_feature (14)..(14): N = G, C, A or T
  misc_feature (30)..(30): N = G, C, A or T
  misc_feature (37)..(37): N = G, C, A or T
  misc_feature (37)..(37): N = G, C, A or T
  misc_feature (40)..(40): N = G, C, A or T
  misc_feature (44)..(44): N = G, C, A or T
tgtgcgcnnngtgnatgtatatgtggtctnggctctnagnctgnct

SEQ ID NO: 433 - DNA, 51 bp, Nicotiana tabacum
  misc_feature (31)..(31): N = G, C, A or T
tgcagcttggggaagaccaggatatgagcgncggagtgagccactccatat

SEQ ID NO: 434 - DNA, 61 bp, Nicotiana tabacum
gacaacaccatcaggtacaatggccaagtcgcaggcactgggagacgtaccaagttaggat

SEQ ID NO: 435 - DNA, 91 bp, Nicotiana tabacum
  misc_feature (10)..(10): N = G, C, A or T
  misc_feature (26)..(26): N = G, C, A or T
  misc_feature (38)..(38): N = G, C, A or T
  misc_feature (48)..(48): N = G, C, A or T
  misc_feature (52)..(52): N = G, C, A or T
  misc_feature (61)..(61): N = G, C, A or T
  misc_feature (68)..(68): N = G, C, A or T
  misc_feature (74)..(74): N = G, C, A or T
tgaactaganatgtcattctatagcnagtattcagccngtgctgtgtnttancataatatnaagaatntttctnacttacgtgcaggggat

SEQ ID NO: 436 - DNA, 84 bp, Nicotiana tabacum
  misc_feature (1)..(1): N = G, C, A or T
natagaggaggacccatctgactcccgtcttcttcttcattagaaatgggaatcaacatccacgaacaaaaatgctatcgctat

SEQ ID NO: 437 - DNA, 66 bp, Nicotiana tabacum
  misc_feature (26)..(26): N = G, C, A or T
  misc_feature (30)..(30): N = G, C, A or T
  misc_feature (35)..(35): N = G, C, A or T
  misc_feature (40)..(40): N = G, C, A or T
  misc_feature (47)..(47): N = G, C, A or T
  misc_feature (50)..(50): N = G, C, A or T
  misc_feature (53)..(53): N = G, C, A or T
  misc_feature (61)..(61): N = G, C, A or T
  misc_feature (65)..(65): N = G, C, A or T
tcagcctcccggctttaacctactgngggnacagnatgtnggaaatnccngcnaagctggntggnt

SEQ ID NO: 438 - DNA, 128 bp, Nicotiana tabacum
  misc_feature (3)..(4): N = G, C, A or T
  misc_feature (9)..(9): N = G, C, A or T
  misc_feature (22)..(22): N = G, C, A or T
  misc_feature (39)..(39): N = G, C, A or T
  misc_feature (103)..(105): N = G, C, A or T
  misc_feature (116)..(117): N = G, C, A or T
ggnnatgcncattggaaacacncgaatgaaacgtttctntgcgaaagtactcaccaacgagtgccattggaaagatttctatattgttatggaacgcctagannncaatacagtgnnacgcagcatct

SEQ ID NO: 439 - DNA, 33 bp, Nicotiana tabacum
  misc_feature (14)..(14): N = G, C, A or T
  misc_feature (21)..(21): N = G, C, A or T
  misc_feature (24)..(24): N = G, C, A or T
  misc_feature (32)..(32): N = G, C, A or T
catctcgcaatgtnatccagngtnagctaacng

SEQ ID NO: 440 - DNA, 58 bp, Nicotiana tabacum
  misc_feature (9)..(9): N = G, C, A or T
  misc_feature (16)..(16): N = G, C, A or T
  misc_feature (22)..(22): N = G, C, A or T
  misc_feature (32)..(32): N = G, C, A or T
  misc_feature (37)..(37): N = G, C, A or T
  misc_feature (38)..(38): N = G, C, A or T
  misc_feature (50)..(50): N = G, C, A or T
  misc_feature (52)..(52): N = G, C, A or T
tataatccngcactcncaggancgcaaatagntgtgnntgatggttattntngttatg

SEQ ID NO: 441 - DNA, 224 bp, Nicotiana tabacum
  misc_feature (4)..(4): N = G, C, A or T
  misc_feature (15)..(16): N = G, C, A or T
  misc_feature (18)..(18): N = G, C, A or T
  misc_feature (37)..(37): N = G, C, A or T
accnaagatcccccnntnaaacacccaatcccccctntccggcaatgaagctgccggagctgacattgatctggccgatgttttcgccaagtacttgaaccaaggtacaacaaatgataatgatcatgatcaagataatattcttcaagaatctcccttggctgatcaagattattgttctattggagcaagcttatcaaattctccttcattagatagcttgg

SEQ ID NO: 442 - DNA, 65 bp, Nicotiana tabacum
  misc_feature (5)..(5): N = G, C, A or T
  misc_feature (9)..(9): N = G, C, A or T
  misc_feature (13)..(14): N = G, C, A or T
  misc_feature (35)..(37): N = G, C, A or T
  misc_feature (49)..(49): N = G, C, A or T
accanaacncaanngaaagggcccctacttatagnnnccaaggaggagnacaagttactgattgg

SEQ ID NO: 443 - DNA, 65 bp, Nicotiana tabacum
  misc_feature (26)..(26): N = G, C, A or T
  misc_feature (32)..(32): N = G, C, A or T
  misc_feature (35)..(35): N = G, C, A or T
  misc_feature (55)..(55): N = G, C, A or T
  misc_feature (64)..(64): N = G, C, A or T
ctattaaatacctccgggttttaaanaccacncgnctatattaccggttccgaancattgtgcng

SEQ ID NO: 444 - DNA, 53 bp, Nicotiana tabacum
  misc_feature (1)..(1): N = G, C, A or T
  misc_feature (3)..(3): N = G, C, A or T
  misc_feature (20)..(20): N = G, C, A or T
  misc_feature (27)..(27): N = G, C, A or T
  misc_feature (45)..(45): N = G, C, A or T
  misc_feature (49)..(49): N = G, C, A or T
ncncggaaaggccccccttngtggggnaaacgacccggactctcnggcngccc

SEQ ID NO: 445 - DNA, 85 bp, Nicotiana tabacum
gtaagggtaaggtcttcgctacaactacagtcgtttggtgggtaacaaccatcaataacattatcatccttctcaatcttagccg

SEQ ID NO: 446 - DNA, 157 bp, Nicotiana tabacum
  misc_feature (4)..(4): N = G, C, A or T
  misc_feature (8)..(8): N = G, C, A or T
  misc_feature (16)..(16): N = G, C, A or T
  misc_feature (22)..(22): N = G, C, A or T
  misc_feature (35)..(35): N = G, C, A or T
  misc_feature (43)..(43): N = G, C, A or T
  misc_feature (45)..(45): N = G, C, A or T
  misc_feature (60)..(60): N = G, C, A or T
  misc_feature (63)..(63): N = G, C, A or T
  misc_feature (67)..(67): N = G, C, A or T
  misc_feature (69)..(69): N = G, C, A or T
  misc_feature (70)..(71): N = G, C, A or T
  misc_feature (74)..(74): N = G, C, A or T
  misc_feature (89)..(89): N = G, C, A or T
  misc_feature (95)..(95): N = G, C, A or T
  misc_feature (97)..(97): N = G, C, A or T
  misc_feature (99)..(99): N = G, C, A or T
  misc_feature (119)..(119): N = G, C, A or T
  misc_feature (141)..(141): N = G, C, A or T
  misc_feature (151)..(151): N = G, C, A or T
  misc_feature (152)..(152): N = G, C, A or T
  misc_feature (156)..(156): N = G, C, A or T
tctntggnaaagcccntgaganattgggaaaactnaacaaacngntaagcagcaggaganccnacangnnnagngaggccatttttttncgacancngngataacaaaaggaagcaggnggcaaattcgagctcagacacngaaaaccagnntctna

SEQ ID NO: 447 - DNA, 125 bp, Nicotiana tabacum
  misc_feature (7)..(7): N = G, C, A or T
  misc_feature (9)..(9): N = G, C, A or T
  misc_feature (13)..(13): N = G, C, A or T
  misc_feature (39)..(39): N = G, C, A or T
  misc_feature (45)..(45): N = G, C, A or T
  misc_feature (52)..(52): N = G, C, A or T
  misc_feature (53)..(53): N = G, C, A or T
  misc_feature (60)..(60): N = G, C, A or T
  misc_feature (66)..(66): N = G, C, A or T
  misc_feature (67)..(68): N = G, C, A or T
  misc_feature (86)..(86): N = G, C, A or T
  misc_feature (99)..(99): N = G, C, A or T
  misc_feature (105)..(105): N = G, C, A or T
  misc_feature (112)..(112): N = G, C, A or T
  misc_feature (115)..(115): N = G, C, A or T
  misc_feature (123)..(123): N = G, C, A or T
actggcntntgcnagcgttaggttgctggttgtcctttncttttncactatnntttttgngctgtnnntcttcaccgtttagggancattacccagttncaaaancagctcngtnacatccgncg

SEQ ID NO: 448 - DNA, 127 bp, Nicotiana tabacum
ctcggcataatcgtgcgttatatcgctggtagtccgaaacattcacaagattatttttctgctgatgctcggcatattatatggattctttattcatcgatattggcacttgatattttctgagtcg

SEQ ID NO: 449 - DNA, 19 bp, Nicotiana tabacum
  misc_feature (1)..(1): N = G, C, A or T
nccgcagagtccctgcagc

SEQ ID NO: 450 - DNA, 30 bp, Nicotiana tabacum
  misc_feature (4)..(4): N = G, C, A or T
  misc_feature (10)..(10): N = G, C, A or T
  misc_feature (29)..(29): N = G, C, A or T
ggtnttgganctccattctctattagccng

SEQ ID NO: 451 - DNA, 85 bp, Nicotiana tabacum
  misc_feature (8)..(8): N = G, C, A or T
  misc_feature (12)..(12): N = G, C, A or T
  misc_feature (19)..(20): N = G, C, A or T
  misc_feature (34)..(35): N = G, C, A or T
  misc_feature (37)..(37): N = G, C, A or T
  misc_feature (40)..(40): N = G, C, A or T
  misc_feature (43)..(43): N = G, C, A or T
  misc_feature (45)..(47): N = G, C, A or T
  misc_feature (57)..(57): N = G, C, A or T
  misc_feature (59)..(59): N = G, C, A or T
  misc_feature (61)..(61): N = G, C, A or T
  misc_feature (66)..(66): N = G, C, A or T
  misc_feature (74)..(74): N = G, C, A or T
  misc_feature (77)..(77): N = G, C, A or T
  misc_feature (82)..(82): N = G, C, A or T
aaggtgangtcncaaaganntgaccggggcctgnntntgntcngnnnacaggcatancngnagacngaagcgangangactnaag

SEQ ID NO: 452 - DNA, 152 bp, Nicotiana tabacum
  misc_feature (3)..(3): N = G, C, A or T
  misc_feature (12)..(12): N = G, C, A or T
  misc_feature (18)..(18): N = G, C, A or T
  misc_feature (41)..(41): N = G, C, A or T
cangtgcaagantgttcntcgaatatttttgtattatatangcaaatagtaaccccacacctactagttgtttctaattttcattttcttttcatttgttactgtttcgatttttttcttaccatgttggataaataatgtgttgactataa

SEQ ID NO: 453 - DNA, 172 bp, Nicotiana tabacum
  misc_feature (3)..(4): N = G, C, A or T
  misc_feature (11)..(13): N = G, C, A or T
  misc_feature (28)..(28): N = G, C, A or T
  misc_feature (31)..(31): N = G, C, A or T
  misc_feature (36)..(36): N = G, C, A or T
  misc_feature (49)..(49): N = G, C, A or T
  misc_feature (54)..(55): N = G, C, A or T
  misc_feature (57)..(57): N = G, C, A or T
  misc_feature (61)..(61): N = G, C, A or T
  misc_feature (63)..(63): N = G, C, A or T
  misc_feature (64)..(64): N = G, C, A or T
  misc_feature (71)..(71): N = G, C, A or T
  misc_feature (77)..(77): N = G, C, A or T
  misc_feature (83)..(83): N = G, C, A or T
  misc_feature (85)..(85): N = G, C, A or T
  misc_feature (94)..(94): N = G, C, A or T
  misc_feature (113)..(113): N = G, C, A or T
  misc_feature (125)..(125): N = G, C, A or T
  misc_feature (127)..(127): N = G, C, A or T
  misc_feature (150)..(150): N = G, C, A or T
  misc_feature (163)..(163): N = G, C, A or T
tcnntgagctnnnttgcagcttctagcnganctttntttgcagcgtctngcagnngntttntnngccatgnttgttnttcctntncatagcccngtgtatttttggctatgancctgctctagtntncatctgccttcagcgtgagcctngtcaactacattnttcttggaa

SEQ ID NO: 454 - DNA, 188 bp, Nicotiana tabacum
  misc_feature (1)..(1): N = G, C, A or T
  misc_feature (4)..(4): N = G, C, A or T
  misc_feature (88)..(88): N = G, C, A or T
ntgnggagcatgagtttattgcgtttgatggttcacatgctaagtctgaatacatttacaccgttttagataacctagtcggtcaaanacaacacattactatttttccagatgctgattctttagttcttgagaatagctgaaagtaatcagagtttagatatgctgaacttccaatacagccttag

SEQ ID NO: 455 - DNA, 234 bp, Nicotiana tabacum
  misc_feature (19)..(19): N = G, C, A or T
  misc_feature (25)..(25): N = G, C, A or T
  misc_feature (46)..(46): N = G, C, A or T
  misc_feature (48)..(48): N = G, C, A or T
  misc_feature (52)..(53): N = G, C, A or T
  misc_feature (65)..(65): N = G, C, A or T
  misc_feature (77)..(77): N = G, C, A or T
  misc_feature (99)..(99): N = G, C, A or T
  misc_feature (102)..(102): N = G, C, A or T
  misc_feature (104)..(104): N = G, C, A or T
  misc_feature (106)..(107): N = G, C, A or T
  misc_feature (110)..(110): N = G, C, A or T
  misc_feature (113)..(114): N = G, C, A or T
  misc_feature (117)..(118): N = G, C, A or T
  misc_feature (120)..(120): N = G, C, A or T
  misc_feature (125)..(125): N = G, C, A or T
  misc_feature (127)..(127): N = G, C, A or T
  misc_feature (128)..(129): N = G, C, A or T
  misc_feature (132)..(132): N = G, C, A or T
  misc_feature (142)..(142): N = G, C, A or T
  misc_feature (143)..(143): N = G, C, A or T
  misc_feature (150)..(151): N = G, C, A or T
  misc_feature (158)..(158): N = G, C, A or T
  misc_feature (160)..(160): N = G, C, A or T
  misc_feature (164)..(164): N = G, C, A or T
  misc_feature (168)..(168): N = G, C, A or T
  misc_feature (173)..(174): N = G, C, A or T
  misc_feature (181)..(181): N = G, C, A or T
  misc_feature (183)..(183): N = G, C, A or T
  misc_feature (188)..(188): N = G, C, A or T
  misc_feature (197)..(197): N = G, C, A or T
  misc_feature (199)..(199): N = G, C, A or T
  misc_feature (224)..(224): N = G, C, A or T
  misc_feature (232)..(232): N = G, C, A or T
gatggcaaagcaacattgnacaggntgaggactactagaatattanangctnntattgggtaggncatacgttggtnctgtgaaagggaatcaatgccntgntntnnctngcnnganntngagcntnnnggngcacaaatgnnctataannagccctntnatgnaggnggagnncacaagngnaggangtgatgccnanctgacctagcttgtgtaacacaggntcattganag

SEQ ID NO: 456 - DNA, 276 bp, Nicotiana tabacum
caaagagtgaggaaaaatggaaactgattgcgtggtgctaccgtttcacacggtatacatgaaaagaaatcaagtcaggtattttgacagtgaggattcataacaaacaacaagatcatatactctgaagtagccgaatccagggagctgttgatctgatctcgatccccagcagcgtgcaggtgactaacaaagctaaaaaccaactctattcaagagctggaggtgcttcaacataataagtaagggctgttcattcttgattctttcaattag

SEQ ID NO: 457 - DNA, 33 bp, Nicotiana tabacum
  misc_feature (20)..(20): N = G, C, A or T
  misc_feature (25)..(25): N = G, C, A or T
ctttgccacattctcggcgncactngtaagtag

SEQ ID NO: 458 - DNA, 73 bp, Nicotiana tabacum
  misc_feature (3)..(3): N = G, C, A or T
  misc_feature (7)..(7): N = G, C, A or T
  misc_feature (9)..(9): N = G, C, A or T
  misc_feature (14)..(14): N = G, C, A or T
  misc_feature (21)..(21): N = G, C, A or T
  misc_feature (31)..(31): N = G, C, A or T
  misc_feature (34)..(34): N = G, C, A or T
  misc_feature (43)..(44): N = G, C, A or T
  misc_feature (48)..(48): N = G, C, A or T
  misc_feature (51)..(51): N = G, C, A or T
  misc_feature (53)..(53): N = G, C, A or T
  misc_feature (55)..(55): N = G, C, A or T
  misc_feature (59)..(59): N = G, C, A or T
  misc_feature (61)..(61): N = G, C, A or T
  misc_feature (69)..(69): N = G, C, A or T
  misc_feature (71)..(71): N = G, C, A or T
tgngcananaacanaggactnaggcaagcgntantatgggganngganccnangnggcncntcaagtgnantc

SEQ ID NO: 459 - DNA, 84 bp, Nicotiana tabacum
  misc_feature (46)..(46): N = G, C, A or T
  misc_feature (48)..(48): N = G, C, A or T
ccccgatgccttcagtagacagaagctcactgctgttgcaccaatntncaccccgatgactctgccagagggcgaactagttgc

SEQ ID NO: 460 - DNA, 127 bp, Nicotiana tabacum
  misc_feature (1)..(1): N = G, C, A or T
  misc_feature (30)..(30): N = G, C, A or T
  misc_feature (38)..(38): N = G, C, A or T
  misc_feature (49)..(49): N = G, C, A or T
  misc_feature (51)..(51): N = G, C, A or T
  misc_feature (58)..(58): N = G, C, A or T
  misc_feature (60)..(60): N = G, C, A or T
  misc_feature (75)..(75): N = G, C, A or T
  misc_feature (76)..(76): N = G, C, A or T
  misc_feature (79)..(79): N = G, C, A or T
  misc_feature (84)..(84): N = G, C, A or T
  misc_feature (85)..(85): N = G, C, A or T
  misc_feature (88)..(88): N = G, C, A or T
  misc_feature (92)..(92): N = G, C, A or T
  misc_feature (106)..(106): N = G, C, A or T
  misc_feature (116)..(117): N = G, C, A or T
  misc_feature (119)..(119): N = G, C, A or T
  misc_feature (121)..(121): N = G, C, A or T
nccggagaaaaggtcgaaaccgaccgtagntaggactnagtttctcttncngaaagancntgatcgggctctagnncanaaccnnggntttnaatatataataganaaacttcttnngnangttatg

SEQ ID NO: 461 - DNA, 201 bp, Nicotiana tabacum
  misc_feature (7)..(7): N = G, C, A or T
  misc_feature (16)..(16): N = G, C, A or T
  misc_feature (20)..(20): N = G, C, A or T
  misc_feature (23)..(23): N = G, C, A or T
  misc_feature (27)..(27): N = G, C, A or T
  misc_feature (34)..(34): N = G, C, A or T
  misc_feature (39)..(39): N = G, C, A or T
  misc_feature (43)..(43): N = G, C, A or T
  misc_feature (51)..(51): N = G, C, A or T
  misc_feature (53)..(53): N = G, C, A or T
  misc_feature (56)..(58): N = G, C, A or T
  misc_feature (61)..(61): N = G, C, A or T
  misc_feature (69)..(69): N = G, C, A or T
  misc_feature (76)..(76): N = G, C, A or T
  misc_feature (77)..(77): N = G, C, A or T
  misc_feature (83)..(83): N = G, C, A or T
  misc_feature (107)..(107): N = G, C, A or T
  misc_feature (122)..(122): N = G, C, A or T
  misc_feature (125)..(125): N = G, C, A or T
  misc_feature (135)..(135): N = G, C, A or T
  misc_feature (140)..(140): N = G, C, A or T
  misc_feature (142)..(142): N = G, C, A or T
  misc_feature (143)..(143): N = G, C, A or T
  misc_feature (149)..(149): N = G, C, A or T
  misc_feature (150)..(151): N = G, C, A or T
  misc_feature (157)..(157): N = G, C, A or T
  misc_feature (160)..(160): N = G, C, A or T
  misc_feature (170)..(170): N = G, C, A or T
  misc_feature (179)..(179): N = G, C, A or T
  misc_feature (190)..(190): N = G, C, A or T
  misc_feature (193)..(193): N = G, C, A or T
  misc_feature (195)..(196): N = G, C, A or T
  misc_feature (197)..(197): N = G, C, A or T
  misc_feature (201)..(201): N = G, C, A or T
tgagganaaagaaggntacngcncttnccgatgnacacncagnaggatgancnatnnnacngactctcnatgctgnncgatgnccagaaggtgagcaactggaagantttcttctgtttttngtncttacatatntgaanannaatcannnaagtangancactaaaacnaacccatantggtccataanctntnnncctn

SEQ ID NO: 462 - DNA, 110 bp, Nicotiana tabacum
gggtaattcaacagtgtagatttttttctagcttttgtagcaaatgaatttttttgatctgttgttgtactgtatccaaaaacaaaaatgttgttcaatgaaagatgaac

SEQ ID NO: 463 - DNA, 47 bp, Nicotiana tabacum
  misc_feature (5)..(5): N = G, C, A or T
tcaangaagctctcaccagtctccattagtagagtctataattatgc

SEQ ID NO: 464 - DNA, 121 bp, Nicotiana tabacum
  misc_feature (6)..(8): N = G, C, A or T
  misc_feature (14)..(14): N = G, C, A or T
  misc_feature (18)..(18): N = G, C, A or T
  misc_feature (20)..(20): N = G, C, A or T
  misc_feature (22)..(22): N = G, C, A or T
  misc_feature (25)..(25): N = G, C, A or T
  misc_feature (35)..(35): N = G, C, A or T
  misc_feature (75)..(75): N = G, C, A or T
  misc_feature (84)..(84): N = G, C, A or T
  misc_feature (99)..(99): N = G, C, A or T
tttgannncccaangagnancncgntgaaaaaggncctgatgaattcaccaccaatgcctcacaatctttgtggnggactaaantgtttttgccttttnttgaaaaagcctttgctcagcg

SEQ ID NO: 465 - DNA, 175 bp, Nicotiana tabacum
  misc_feature (1)..(1): N = G, C, A or T
  misc_feature (6)..(6): N = G, C, A or T
  misc_feature (15)..(15): N = G, C, A or T
  misc_feature (19)..(19): N = G, C, A or T
  misc_feature (22)..(22): N = G, C, A or T
  misc_feature (87)..(87): N = G, C, A or T
ngttgnaaacatgcngccntcngggtctatccaggaatgcgattctgccagatgcgattccacacgctagtcggaaaagtcgatagntataaaaagaagggcaactatcagggtgagctcgcggaaggacctgttccttctcgttcctggaaaatgtttgaagacgagagcgtgc

SEQ ID NO: 466 - DNA, 247 bp, Nicotiana tabacum
  misc_feature (8)..(8): N = G, C, A or T
ggctgccntcagtccacccggagacccaaggtagacctgcaggcgttcgcggggtctggcgtctccctctatctctattacctgtttcattttctttcgttcaaaaacagtttattgtattttcttcaggccttgtttgtagtgactcttagatagtatgtgacactatgacaccagattttgggtattgaggttttgaaagctgtaatagatatagtcttgagttataaaatttgttgatttccgc

SEQ ID NO: 467 - DNA, 237 bp, Nicotiana tabacum
  misc_feature: N = G, C, A or T
acatctaaagacggcaaagttcaagagacttcagctctggcatctgtaagtgggatatcaaagcgcatttctgaaacccctcaacgagaaaatagaaggactagaacaaagcttgaccaaccattctgtagaagcgacacagaaaagggtgaattgctatcacactcaggaaatttcgaatcaataaacgagaatggaaacagaacatgttcccgtactgtattttctcctttcagc

SEQ ID NO: 468 - DNA, 61 bp, Nicotiana tabacum
  misc_feature (3)..(3): N = G, C, A or T
  misc_feature (7)..(7): N = G, C, A or T
  misc_feature (13)..(13): N = G, C, A or T
  misc_feature (16)..(16): N = G, C, A or T
  misc_feature (22)..(22): N = G, C, A or T
  misc_feature (27)..(27): N = G, C, A or T
  misc_feature (33)..(33): N = G, C, A or T
  misc_feature (37)..(37): N = G, C, A or T
  misc_feature (40)..(40): N = G, C, A or T
  misc_feature (47)..(48): N = G, C, A or T
tangcantttttnatngtcgcntgtanaagccncaantcngatcggnnccaaccttctgag

SEQ ID NO: 469 - DNA, 57 bp, Nicotiana tabacum
  misc_feature (5)..(5): N = G, C, A or T
  misc_feature (12)..(13): N = G, C, A or T
  misc_feature (18)..(18): N = G, C, A or T
  misc_feature (21)..(21): N = G, C, A or T
  misc_feature (23)..(23): N = G, C, A or T
  misc_feature (27)..(27): N = G, C, A or T
  misc_feature (39)..(39): N = G, C, A or T
  misc_feature (41)..(41): N = G, C, A or T
  misc_feature (43)..(43): N = G, C, A or T
  misc_feature (52)..(52): N = G, C, A or T
tgtancttcttnngctcntcngntggntgggcagtctgnantnatcagctgncttcc

SEQ ID NO: 470 - DNA, 65 bp, Nicotiana tabacum
  misc_feature (7)..(7): N = G, C, A or T
  misc_feature (12)..(13): N = G, C, A or T
  misc_feature (19)..(19): N = G, C, A or T
  misc_feature (23)..(23): N = G, C, A or T
  misc_feature (29)..(29): N = G, C, A or T
  misc_feature (60)..(60): N = G, C, A or T
  misc_feature (65)..(65): N = G, C, A or T
gaacagnagaannggaagnatanggaagncgaaggagtgagcacaacggcaccaccatgnctcgn

SEQ ID NO: 471 - DNA, 119 bp, Nicotiana tabacum
  misc_feature (23)..(24): N = G, C, A or T
  misc_feature (29)..(29): N = G, C, A or T
  misc_feature (35)..(35): N = G, C, A or T
  misc_feature (46)..(46): N = G, C, A or T
  misc_feature (53)..(53): N = G, C, A or T
  misc_feature (61)..(61): N = G, C, A or T
  misc_feature (65)..(65): N = G, C, A or T
  misc_feature (68)..(68): N = G, C, A or T
  misc_feature (74)..(74): N = G, C, A or T
  misc_feature (78)..(78): N = G, C, A or T
  misc_feature (86)..(86): N = G, C, A or T
  misc_feature (87)..(87): N = G, C, A or T
  misc_feature (92)..(92): N = G, C, A or T
  misc_feature (95)..(95): N = G, C, A or T
  misc_feature (98)..(98): N = G, C, A or T
  misc_feature (103)..(103): N = G, C, A or T
  misc_feature (107)..(107): N = G, C, A or T
  misc_feature (108)..(108): N = G, C, A or T
  misc_feature (110)..(110): N = G, C, A or T
tttttgctagggatggttggacnngtganttttgnatgtgagtgcntctatcntttagcanttcnatnaacttncccncggaaggnnttatncgngcngagcntggnncnatattttgt

SEQ ID NO: 472 - DNA, 56 bp, Nicotiana tabacum
  misc_feature (15)..(15): N = G, C, A or T
  misc_feature (25)..(25): N = G, C, A or T
  misc_feature (33)..(33): N = G, C, A or T
  misc_feature (35)..(35): N = G, C, A or T
  misc_feature (39)..(40): N = G, C, A or T
  misc_feature (46)..(47): N = G, C, A or T
  misc_feature (51)..(53): N = G, C, A or T
  misc_feature (55)..(55): N = G, C, A or T
tgggggcaagcaccngcggcggagnggaggagnangtgnnggcttnncagnnnanc

SEQ ID NO: 473 - DNA, 103 bp, Nicotiana tabacum
  misc_feature (2)..(2): N = G, C, A or T
  misc_feature (16)..(16): N = G, C, A or T
  misc_feature (38)..(38): N = G, C, A or T
  misc_feature (39)..(39): N = G, C, A or T
  misc_feature (41)..(41): N = G, C, A or T
  misc_feature (43)..(43): N = G, C, A or T
  misc_feature (47)..(47): N = G, C, A or T
  misc_feature (66)..(66): N = G, C, A or T
  misc_feature (85)..(85): N = G, C, A or T
tnctttcaagaaatcnatggtgatgaaaatctttttgnngntncganatgaggattcatttggagntagacaattaccaattttnctttgccttctgtaataa

SEQ ID NO: 474 - DNA, 135 bp, Nicotiana tabacum
ttattactgagcttcatttctcctgctttcaatcatatgcatagcatgtaacacttagtttgtttctagaaagattctgattagtatatctatcaacgaataggatgtaactaaaatctggaatatgttagttta

SEQ ID NO: 475 - DNA, 223 bp, Nicotiana tabacum
  misc_feature (12)..(12): N = G, C, A or T
  misc_feature (22)..(22): N = G, C, A or T
  misc_feature (24)..(24): N = G, C, A or T
  misc_feature (35)..(35): N = G, C, A or T
  misc_feature (42)..(42): N = G, C, A or T
  misc_feature (50)..(51): N = G, C, A or T
  misc_feature (65)..(67): N = G, C, A or T
  misc_feature (72)..(72): N = G, C, A or T
  misc_feature (78)..(78): N = G, C, A or T
  misc_feature (81)..(82): N = G, C, A or T
  misc_feature (86)..(86): N = G, C, A or T
  misc_feature (121)..(122): N = G, C, A or T
  misc_feature (126)..(126): N = G, C, A or T
  misc_feature (132)..(132): N = G, C, A or T
  misc_feature (134)..(134): N = G, C, A or T
  misc_feature (139)..(139): N = G, C, A or T
  misc_feature (154)..(154): N = G, C, A or T
  misc_feature (215)..(215): N = G, C, A or T
cattatgcgganttacaggatnantacaacgactnatctganaagcatannttgatcttgcaggnnntacangatgtnaanntggntgcagcaaaagcaggaagaaaaggtcatggtgctnntttngccaanantctcnctgcggagctctcanctttgagagtggaaagggagagggagagggaaatgctgaaaaaggagaatagaagccttanagctcaac

SEQ ID NO: 476 - DNA, 17 bp, Nicotiana tabacum
  misc_feature (5)..(5): N = G, C, A or T
  misc_feature (9)..(9): N = G, C, A or T
tatcncaantactggac

SEQ ID NO: 477 - DNA, 26 bp, Nicotiana tabacum
  misc_feature (1)..(1): N = G, C, A or T
nttaggttaagtactttattttgaac

SEQ ID NO: 478 - DNA, 48 bp, Nicotiana tabacum
ccaaggaaaaaggaaatcttgataaaggacttttggaatgttgtttgc

SEQ ID NO: 479 - DNA, 91 bp, Nicotiana tabacum
  misc_feature (3)..(3): N = G, C, A or T
  misc_feature (5)..(5): N = G, C, A or T
agnanccctgttgtttcatcggattcggctactgcctcatcagagttgctctcagatttcgaccggagttttcgttttctgatggatttca

SEQ ID NO: 480 - DNA, 110 bp, Nicotiana tabacum
  misc_feature (5)..(5): N = G, C, A or T
tcggnatataatatcaccgcaaatgacctcgactctcaaatggcgaccttgaccgcgaaactacaatgattcaaactcgaaaaatgctcaatgatgttcaacctgcttta

SEQ ID NO: 481 - DNA, 283 bp, Nicotiana tabacum
  misc_feature (8)..(8): N = G, C, A or T
gccccttnaacagcagcaaaaaggacagcagtcaattccccttttccctaagactgccaatgcctagtcaatccatcatctatctaatcggaagcagaaaataccaaggcttccagaacaccagagcattgtcactgcaacttggtgggcattttccatttagaactgacatctgttgagtgaaaattttatagcgcactctttgcacatcttactggtccaataatgttcttccaatttgatgctgtttctatgctaatccaagacctgtttcccgtctcct

SEQ ID NO: 482 - DNA, 48 bp, Nicotiana tabacum
  misc_feature (10)..(10): N = G, C, A or T
agacgctgtnaagtaatgaatttcttgaggacgctcatcgaaaggacc

SEQ ID NO: 483 - DNA, 76 bp, Nicotiana tabacum
  misc_feature (10)..(10): N = G, C, A or T
  misc_feature (25)..(25): N = G, C, A or T
  misc_feature (42)..(42): N = G, C, A or T
  misc_feature (70)..(70): N = G, C, A or T
tgcccttttnccagccgtgtgttgntattttcgtcacaaagnttatcacaggtctcaaagatcaccaatnaagagc

SEQ ID NO: 484 - DNA, 136 bp, Nicotiana tabacum
  misc_feature (9)..(9): N = G, C, A or T
  misc_feature (12)..(12): N = G, C, A or T
  misc_feature (42)..(42): N = G, C, A or T
  misc_feature (116)..(116): N = G, C, A or T
  misc_feature (135)..(135): N = G, C, A or T
ttcccgctntanacgcccttattcgagtttgaggatctgtcnaggtcgagtttacggcgagtcaagttgtaatcttgttgttttgacaacgagtcgatgtttttagtcaagtaacncaataccaaaggaaatggnc

SEQ ID NO: 485 - DNA, 145 bp, Nicotiana tabacum
  misc_feature (4)..(4): N = G, C, A or T
  misc_feature (8)..(8): N = G, C, A or T
  misc_feature (52)..(52): N = G, C, A or T
  misc_feature (62)..(62): N = G, C, A or T
ctancggnaaatctccttcttcacaaacgaaaccctagcaaaactccatctncatatcaggncgtttcaacactagagaccaaaggaatgtctcttcagccaagagtcatgccctcccatccgttctgcttcttcaccatcttca

SEQ ID NO: 486 - DNA, 149 bp, Nicotiana tabacum
  misc_feature (6)..(6): N = G, C, A or T
  misc_feature (21)..(21): N = G, C, A or T
ctcctncttttattttaccgntagctgatattgttgctttgattggctttctaaaaattgtaaaatgcatatttacgcttgaattttcagagatgtattttgggtgattgctttgtttattttgagaagtagagatattgaattccacc

SEQ ID NO: 487 - DNA, 170 bp, Nicotiana tabacum
  misc_feature (9)..(9): N = G, C, A or T
  misc_feature (69)..(69): N = G, C, A or T
aggaaaatngtgagagcaaaataaatgagagaacgaggaagaaacagatatggatatgagaaaacgatncgcttttcttctttcccattcacctgaaaccaaaaacacctctctcattttagctactgaaacaatcaccaaatgtcacctaaacaaccagaaaacctcca

SEQ ID NO: 488 - DNA, 208 bp, Nicotiana tabacum
  misc_feature (2)..(3): N = G, C, A or T
  misc_feature (7)..(8): N = G, C, A or T
  misc_feature (18)..(19): N = G, C, A or T
  misc_feature (20)..(21): N = G, C, A or T
  misc_feature (29)..(29): N = G, C, A or T
  misc_feature (36)..(36): N = G, C, A or T
  misc_feature (50)..(50): N = G, C, A or T
  misc_feature (56)..(56): N = G, C, A or T
  misc_feature (59)..(59): N = G, C, A or T
  misc_feature (60)..(60): N = G, C, A or T
  misc_feature (62)..(62): N = G, C, A or T
  misc_feature (67)..(67): N = G, C, A or T
  misc_feature (75)..(75): N = G, C, A or T
  misc_feature (88)..(88): N = G, C, A or T
  misc_feature (92)..(92): N = G, C, A or T
  misc_feature (97)..(97): N = G, C, A or T
  misc_feature (101)..(101): N = G, C, A or T
  misc_feature (103)..(103): N = G, C, A or T
  misc_feature (109)..(109): N = G, C, A or T
  misc_feature (114)..(114): N = G, C, A or T
  misc_feature (120)..(120): N = G, C, A or T
  misc_feature (124)..(124): N = G, C, A or T
  misc_feature (159)..(159): N = G, C, A or T
  misc_feature (162)..(162): N = G, C, A or T
  misc_feature (171)..(171): N = G, C, A or T
  misc_feature (176)..(176): N = G, C, A or T
  misc_feature (178)..(178): N = G, C, A or T
  misc_feature (182)..(182): N = G, C, A or T
  misc_feature (186)..(186): N = G, C, A or T
  misc_feature (190)..(190): N = G, C, A or T
  misc_feature (197)..(197): N = G, C, A or T
  misc_feature (199)..(199): N = G, C, A or T
  misc_feature (202)..(202): N = G, C, A or T
anncccnntttgagggannnnggctgggnctgatgngtgtgatgctacgnacttanganncnatgcngaaaaaangtatatctacgtngganggccnttgntncctggnggcgnagatgncgcnatttgtacttagacacatttcaaagcatgttggcnaanggagattgngaaantnttgntgtnaaanttagtcntnagngttacc

SEQ ID NO: 489 - DNA, 228 bp, Nicotiana tabacum
  misc_feature (2)..(2): N = G, C, A or T
  misc_feature (10)..(10): N = G, C, A or T
  misc_feature (17)..(17): N = G, C, A or T
tncccggttngttaagngacttcagctctggcatctgtaagtgggatatcaaagcgcatttctgaaacccctcaacgagaaaatagaaggactagaacaaagcttgaccaaccattctgtagaagcgacacagaaaagggtgaattgctatcacactcaggaaatttcgaatcaataaacgagaatggaaacagaacatgttcccgtactgtattttctcctttcagc

SEQ ID NO: 490 - DNA, 201 bp, Nicotiana tabacum
  misc_feature (5)..(5): N = G, C, A or T
  misc_feature (9)..(9): N = G, C, A or T
tcaantganaggtgtgggaagaaatgaagaattgttgatggcttattttgggaaaagccttacaggagtagcttccgaatggtttatggatcaagacacgtcttgtcaaacagttccaatacaacattgacattgccccagaccgcaattccctttcaaacttgaagaagaaaccaactgaaagtttcagggaatatgcca

SEQ ID NO: 491 - DNA, 49 bp, Nicotiana tabacum
  misc_feature (5)..(5): N = G, C, A or T
ggaancgggaattcttgataaagggacttttgggaatggttggtttggc

SEQ ID NO: 492 - DNA, 88 bp, Nicotiana tabacum
  misc_feature (3)..(3): N = G, C, A or T
  misc_feature (6)..(6): N = G, C, A or T
gcnttncggaattcctctctctatatgagactgaaagactatgttcaggaacttgctaaatttgagattgatacacacaacattataa

SEQ ID NO: 493 - DNA, 101 bp, Nicotiana tabacum
  misc_feature (1)..(2): N = G, C, A or T
  misc_feature (31)..(31): N = G, C, A or T
  misc_feature (32)..(32): N = G, C, A or T
  misc_feature (36)..(37): N = G, C, A or T
  misc_feature (40)..(40): N = G, C, A or T
  misc_feature (47)..(47): N = G, C, A or T
  misc_feature (49)..(49): N = G, C, A or T
  misc_feature (52)..(52): N = G, C, A or T
  misc_feature (62)..(62): N = G, C, A or T
  misc_feature (66)..(66): N = G, C, A or T
  misc_feature (69)..(69): N = G, C, A or T
  misc_feature (73)..(73): N = G, C, A or T
  misc_feature (89)..(89): N = G, C, A or T
  misc_feature (98)..(98): N = G, C, A or T
nnctggtaagaaatagatggtgacagaaaanntttnnggngttacgntngangattcattangggnganaaanaccaattttcctttgncttctgtantaa

SEQ ID NO: 494 - DNA, 41 bp, Nicotiana tabacum
gggcctttagggaaggatgctttgttggcttatggttatga

SEQ ID NO: 495 - DNA, 79 bp, Nicotiana tabacum
  misc_feature (3)..(4): N = G, C, A or T
  misc_feature (10)..(10): N = G, C, A or T
  misc_feature (43)..(43): N = G, C, A or T
ttnnctccantacggaaacaagcaccggctaccgaggactccnatatgacacgagaacttttcaggtttggcgcccgtt

SEQ ID NO: 496 - DNA, 92 bp, Nicotiana tabacum
  misc_feature (17)..(18): N = G, C, A or T
  misc_feature (20)..(20): N = G, C, A or T
  misc_feature (26)..(26): N = G, C, A or T
  misc_feature (33)..(33): N = G, C, A or T
  misc_feature (37)..(38): N = G, C, A or T
  misc_feature (56)..(56): N = G, C, A or T
  misc_feature (81)..(81): N = G, C, A or T
ggtatggaagagctcanncnaaacgngaggaantttnnggaaaacaatatggagcntcaacatggataggaaatgtcaaangcttgggcgct

SEQ ID NO: 497 - DNA, 88 bp, Nicotiana tabacum
gtccgaacaccaagagagaaacccagtgccaatggagttcaattttcatactgaaaagaggattcatcataatccgcaattgatctgt

SEQ ID NO: 498 - DNA, 135 bp, Nicotiana tabacum
  misc_feature (10)..(10): N = G, C, A or T
  misc_feature (16)..(16): N = G, C, A or T
  misc_feature (22)..(23): N = G, C, A or T
  misc_feature (28)..(28): N = G, C, A or T
  misc_feature (42)..(44): N = G, C, A or T
  misc_feature (55)..(55): N = G, C, A or T
  misc_feature (57)..(57): N = G, C, A or T
  misc_feature (66)..(66): N = G, C, A or T
  misc_feature (74)..(74): N = G, C, A or T
  misc_feature (77)..(77): N = G, C, A or T
  misc_feature (79)..(79): N = G, C, A or T
  misc_feature (89)..(89): N = G, C, A or T
  misc_feature (102)..(102): N = G, C, A or T
gaaatacacnatttcnagctgnnccctngaatggatgccaannntgctaatgctngnccaatgacngtatcganaanangtcgcacacnagaattgaggctnacagggatatgattacacctgttggagacgctt

SEQ ID NO: 499 - DNA, 130 bp, Nicotiana tabacum
  misc_feature (6)..(6): N = G, C, A or T
  misc_feature (12)..(12): N = G, C, A or T
  misc_feature (20)..(20): N = G, C, A or T
  misc_feature (21)..(21): N = G, C, A or T
  misc_feature (24)..(25): N = G, C, A or T
  misc_feature (34)..(35): N = G, C, A or T
  misc_feature (37)..(37): N = G, C, A or T
  misc_feature (39)..(39): N = G, C, A or T
  misc_feature (42)..(42): N = G, C, A or T
  misc_feature (47)..(47): N = G, C, A or T
  misc_feature (56)..(56): N = G, C, A or T
  misc_feature (63)..(64): N = G, C, A or T
  misc_feature (72)..(72): N = G, C, A or T
  misc_feature (77)..(77): N = G, C, A or T
  misc_feature (78)..(78): N = G, C, A or T
  misc_feature (81)..(81): N = G, C, A or T
  misc_feature (87)..(90): N = G, C, A or T
  misc_feature (116)..(116): N = G, C, A or T
  misc_feature (123)..(123): N = G, C, A or T
gaacantgatgntttcctcnnggnnggctaaggnntncnccnacccngacagggcntggattnnggttcttntttcnncgngtcccnnnnaatctgactttgactactaagaattncatacgngtggggt

SEQ ID NO: 500 - DNA, 126 bp, Nicotiana tabacum
ttatgtttcttgagtgttttctgtctgtgaaggtttagctcacaccaagttttcttttcatttgctaacaccaatgttcccactgaaatgtgggacaaaagtaggaagcaaagggtgagagctgct

SEQ ID NO: 501 - DNA, 158 bp, Nicotiana tabacum
  misc_feature (11)..(11): N = G, C, A or T
  misc_feature (42)..(42): N = G, C, A or T
  misc_feature (65)..(65): N = G, C, A or T
  misc_feature (89)..(89): N = G, C, A or T
gcgcctttgtntataatgcaccttttttcttctgaaaatatnctcctgatgatcttgctttggcnctatgaattcattattgtttgtgntgaattggctaaacctaggggtaccaactttttattcctgaagtggtggaacatttacctatcttgttt

SEQ ID NO: 502 - DNA, 139 bp, Nicotiana tabacum
  misc_feature (6)..(6): N = G, C, A or T
  misc_feature (8)..(8): N = G, C, A or T
  misc_feature (9)..(9): N = G, C, A or T
  misc_feature (10)..(10): N = G, C, A or T
  misc_feature (21)..(21): N = G, C, A or T
  misc_feature (24)..(24): N = G, C, A or T
  misc_feature (30)..(30): N = G, C, A or T
  misc_feature (62)..(62): N = G, C, A or T
  misc_feature (69)..(69): N = G, C, A or T
  misc_feature (124)..(124): N = G, C, A or T
actaancnnnccccataactncgnttaatntacatcaaacctgtactctctccatgtaatgnggttgtnagatcactgttctctatacgaggctcattacataccgaatatacgaccctcttgnttctcttttggctgt

SEQ ID NO: 503 - DNA, 206 bp, Nicotiana tabacum
  misc_feature (1)..(1): N = G, C, A or T
  misc_feature (4)..(4): N = G, C, A or T
  misc_feature (10)..(10): N = G, C, A or T
  misc_feature (19)..(19): N = G, C, A or T
  misc_feature (24)..(24): N = G, C, A or T
  misc_feature (26)..(26): N = G, C, A or T
  misc_feature (47)..(47): N = G, C, A or T
  misc_feature (55)..(55): N = G, C, A or T
  misc_feature (98)..(98): N = G, C, A or T
  misc_feature (100)..(100): N = G, C, A or T
  misc_feature (104)..(104): N = G, C, A or T
  misc_feature (113)..(113): N = G, C, A or T
  misc_feature (153)..(153): N = G, C, A or T
  misc_feature (172)..(172): N = G, C, A or T
  misc_feature (175)..(175): N = G, C, A or T
  misc_feature (189)..(189): N = G, C, A or T
  misc_feature (190)..(191): N = G, C, A or T
  misc_feature (200)..(200): N = G, C, A or T
nacngcgagngatactccnaaacngnaaaagaactccggaacacgcntggagcangagatttttttgagcacacaaggcggagccaagctctaacagncngcangaaggaagngatgcatggtgagagtacaggcgagaacacatgacatctntaacatactctcacataanctngaaactgacgtgtnnnacagaactnaatgct

SEQ ID NO: 504 - DNA, 284 bp, Nicotiana tabacum
  misc_feature (1)..(1): N = G, C, A or T
  misc_feature (10)..(10): N = G, C, A or T
  misc_feature (13)..(13): N = G, C, A or T
  misc_feature (34)..(34): N = G, C, A or T
  misc_feature (104)..(104): N = G, C, A or T
  misc_feature (249)..(249): N = G, C, A or T
  misc_feature (253)..(253): N = G, C, A or T
  misc_feature (267)..(267): N = G, C, A or T
natcctcccntcnaaaagcccgggttgccagggnttgacgtctgaccgatttgcagaagtatcattgaatgttgctcgtcatatatctgcagacttggagaggntttaccgcaatgtggggggtcagccgcaggaacaagcgccttgattacagtgatgctggtggattctactgcagagatcaaagtcttctttagctagcagtccttttgattattcttttgttatctttgagtttgtaagagtctnctgntgttttgatcatgntattttgccttttattt

SEQ ID NO: 505 - DNA, 54 bp, Nicotiana tabacum
  misc_feature (3)..(3): N = G, C, A or T
  misc_feature (14)..(14): N = G, C, A or T
  misc_feature (23)..(23): N = G, C, A or T
  misc_feature (36)..(36): N = G, C, A or T
ttntggagaaaggngtgtaatgnacattgtgtgtangcacaacatggattttgt

SEQ ID NO: 506 - DNA, 100 bp, Nicotiana tabacum
  misc_feature (16)..(16): N = G, C, A or T
  misc_feature (30)..(31): N = G, C, A or T
  misc_feature (42)..(44): N = G, C, A or T
  misc_feature (53)..(53): N = G, C, A or T
  misc_feature (58)..(58): N = G, C, A or T
  misc_feature (75)..(75): N = G, C, A or T
acctggttgttccganccaccaagagagannccacagtgccnnnggagtccanttttnatactgaaaagaggatncatcataatccgccaattgatctgt

SEQ ID NO: 507 - DNA, 211 bp, Nicotiana tabacum
tgtggcaaaacatgtaagcgagcagctaatcaacaagcttgattcggagatagaagccgctgaaaaagctcatgaagatgaaccatgacatagctcaaagattacttagatatagtagttcaaccttactaatttttgttgcatagtgcaaatagacttcttgaatgctttgtagaggtgaacccaaacttgtcatatcaattctatagtg

SEQ ID NO: 508 - DNA, 68 bp, Nicotiana tabacum
  misc_feature (5)..(5): N = G, C, A or T
  misc_feature (11)..(11): N = G, C, A or T
  misc_feature (20)..(20): N = G, C, A or T
  misc_feature (24)..(24): N = G, C, A or T
  misc_feature (36)..(36): N = G, C, A or T
  misc_feature (39)..(39): N = G, C, A or T
  misc_feature (44)..(44): N = G, C, A or T
  misc_feature (64)..(64): N = G, C, A or T
aggcnctgctnctgggtccnactntgctacacaagnaanaaaanagcaagctctcgttggtttnctct

SEQ ID NO: 509 - DNA, 120 bp, Nicotiana tabacum
  misc_feature (3)..(3): N = G, C, A or T
  misc_feature (13)..(13): N = G, C, A or T
  misc_feature (20)..(20): N = G, C, A or T
  misc_feature (24)..(24): N = G, C, A or T
  misc_feature (32)..(32): N = G, C, A or T
  misc_feature (35)..(35): N = G, C, A or T
  misc_feature (37)..(37): N = G, C, A or T
  misc_feature (41)..(43): N = G, C, A or T
  misc_feature (45)..(45): N = G, C, A or T
  misc_feature (60)..(60): N = G, C, A or T
  misc_feature (65)..(65): N = G, C, A or T
  misc_feature (67)..(68): N = G, C, A or T
  misc_feature (80)..(80): N = G, C, A or T
  misc_feature (96)..(96): N = G, C, A or T
  misc_feature (99)..(99): N = G, C, A or T
  misc_feature (118)..(118): N = G, C, A or T
ggntcggaaatcncggatgnaagnccccaagncgnangatnnnangcgcaggggtatagnatgananncctatgctatanggagctacagtaggcnagnttattgaggcctgacattncc

SEQ ID NO: 510 - DNA, 162 bp, Nicotiana tabacum
  misc_feature (2)..(2): N = G, C, A or T
  misc_feature (4)..(4): N = G, C, A or T
  misc_feature (11)..(11): N = G, C, A or T
  misc_feature (12)..(12): N = G, C, A or T
  misc_feature (20)..(20): N = G, C, A or T
  misc_feature (53)..(53): N = G, C, A or T
  misc_feature (55)..(55): N = G, C, A or T
  misc_feature (63)..(63): N = G, C, A or T
  misc_feature (69)..(69): N = G, C, A or T
  misc_feature (80)..(80): N = G, C, A or T
  misc_feature (82)..(82): N = G, C, A or T
  misc_feature (120)..(120): N = G, C, A or T
  misc_feature (131)..(131): N = G, C, A or T
gncncggtttnngctccgcnattgatcgttactgtgactagacagaaacctgnangtcttcanactttnacaaaaggaangngctgacaaggcaacaggccttccatcctatgatcacgnagaatcaactnttggagcatttgacaacattgcgctatagcc

SEQ ID NO: 511 - DNA, 230 bp, Nicotiana tabacum
  misc_feature (3)..(3): N = G, C, A or T
  misc_feature (21)..(21): N = G, C, A or T
  misc_feature (24)..(24): N = G, C, A or T
  misc_feature (40)..(40): N = G, C, A or T
  misc_feature (46)..(46): N = G, C, A or T
  misc_feature (49)..(49): N = G, C, A or T
  misc_feature (50)..(51): N = G, C, A or T
  misc_feature (54)..(55): N = G, C, A or T
  misc_feature (58)..(58): N = G, C, A or T
  misc_feature (68)..(68): N = G, C, A or T
  misc_feature (71)..(71): N = G, C, A or T
  misc_feature (93)..(93): N = G, C, A or T
  misc_feature (96)..(96): N = G, C, A or T
  misc_feature (98)..(98): N = G, C, A or T
  misc_feature (100)..(100): N = G, C, A or T
  misc_feature (125)..(125): N = G, C, A or T
  misc_feature (130)..(130): N = G, C, A or T
  misc_feature (147)..(147): N = G, C, A or T
  misc_feature (154)..(155): N = G, C, A or T
  misc_feature (159)..(159): N = G, C, A or T
  misc_feature (160)..(160): N = G, C, A or T
  misc_feature (165)..(165): N = G, C, A or T
  misc_feature (167)..(167): N = G, C, A or T
  misc_feature (188)..(188): N = G, C, A or T
  misc_feature (199)..(199): N = G, C, A or T
  misc_feature (206)..(206): N = G, C, A or T
  misc_feature (210)..(210): N = G, C, A or T
  misc_feature (213)..(213): N = G, C, A or T
  misc_feature (221)..(221): N = G, C, A or T
  misc_feature (223)..(224): N = G, C, A or T
aanccctactttatacatgangtntgtgaatacttgtaanggaagnatnnngannagnttgggatgcnaangtatgttctggtgttatgcatnctncnantgctcttgctgaaatccacaactanaatantacttgcactacattanggctgtnnttanncaatnantagttttttgctgatttgcanctccatgtatngatagcngagngtngacaatcnannattcct

SEQ ID NO: 512 - DNA, 69 bp, Nicotiana tabacum
  misc_feature (1)..(1): N = G, C, A or T
  misc_feature (3)..(3): N = G, C, A or T
  misc_feature (7)..(7): N = G, C, A or T
  misc_feature (18)..(18): N = G, C, A or T
  misc_feature (21)..(21): N = G, C, A or T
  misc_feature (31)..(31): N = G, C, A or T
  misc_feature (48)..(48): N = G, C, A or T
nancccnctgtaagctcnctnaggactagtntaaaggggggcaaacanctgatgaatgccaactgagat

SEQ ID NO: 513 - DNA, 51 bp, Nicotiana tabacum
  misc_feature (1)..(2): N = G, C, A or T
  misc_feature (10)..(10): N = G, C, A or T
  misc_feature (14)..(14): N = G, C, A or T
  misc_feature (15)..(16): N = G, C, A or T
  misc_feature (23)..(23): N = G, C, A or T
  misc_feature (30)..(30): N = G, C, A or T
  misc_feature (34)..(34): N = G, C, A or T
  misc_feature (43)..(43): N = G, C, A or T
  misc_feature (44)..(44): N = G, C, A or T
  misc_feature (48)..(48): N = G, C, A or T
nncttttttngtgnnncatattnatgtttntatnacaaaaganntgtntaa

SEQ ID NO: 514 - DNA, 61 bp, Nicotiana tabacum
  misc_feature (9)..(9): N = G, C, A or T
  misc_feature (18)..(19): N = G, C, A or T
  misc_feature (33)..(33): N = G, C, A or T
  misc_feature (38)..(38): N = G, C, A or T
  misc_feature (46)..(46): N = G, C, A or T
gccccgatnttttagggnnaaactctgcatttntgaanggaatgangtctatacgcattga

SEQ ID NO: 515 - DNA, 70 bp, Nicotiana tabacum
  misc_feature (3)..(3): N = G, C, A or T
  misc_feature (5)..(5): N = G, C, A or T
  misc_feature (8)..(9): N = G, C, A or T
  misc_feature (14)..(14): N = G, C, A or T
  misc_feature (19)..(19): N = G, C, A or T
  misc_feature (21)..(21): N = G, C, A or T
  misc_feature (24)..(24): N = G, C, A or T
  misc_feature (26)..(26): N = G, C, A or T
  misc_feature (40)..(41): N = G, C, A or T
  misc_feature (48)..(49): N = G, C, A or T
  misc_feature (53)..(53): N = G, C, A or T
  misc_feature (66)..(67): N = G, C, A or T
atncnacnnttgcnatgcntngtncngggacttgaagccnngcaatcnnctgnggaatgccagctnngat

SEQ ID NO: 516 - DNA, 72 bp, Nicotiana tabacum; identical to SEQ ID NO: 315
  misc_feature (3)..(3): N = G, C, A or T
  misc_feature (7)..(7): N = G, C, A or T
  misc_feature (9)..(9): N = G, C, A or T
  misc_feature (16)..(16): N = G, C, A or T
  misc_feature (20)..(20): N = G, C, A or T
  misc_feature (31)..(31): N = G, C, A or T
  misc_feature (41)..(41): N = G, C, A or T
  misc_feature (66)..(66): N = G, C, A or T

SEQ ID NO: 517 - DNA, 81 bp, Nicotiana tabacum
  misc_feature (5)..(5): N = G, C, A or T
  misc_feature (8)..(8): N = G, C, A or T
  misc_feature (18)..(18): N = G, C, A or T
  misc_feature (20)..(20): N = G, C, A or T
  misc_feature (21)..(21): N = G, C, A or T
  misc_feature (25)..(25): N = G, C, A or T
  misc_feature (36)..(36): N = G, C, A or T
  misc_feature (43)..(43): N = G, C, A or T
  misc_feature (47)..(47): N = G, C, A or T
  misc_feature (52)..(52): N = G, C, A or T
  misc_feature (54)..(54): N = G, C, A or T
  misc_feature (60)..(61): N = G, C, A or T
  misc_feature (67)..(67): N = G, C, A or T
  misc_feature (76)..(77): N = G, C, A or T
tcctnatnttagcggccngnntgcngttctggtcantgatgcnactntcggncnaatatnntgatgngtgcgacannggga

SEQ ID NO: 518 - DNA, 113 bp, Nicotiana tabacum
  misc_feature (5)..(5): N = G, C, A or T
  misc_feature (10)..(11): N = G, C, A or T
  misc_feature (22)..(22): N = G, C, A or T
  misc_feature (30)..(30): N = G, C, A or T
  misc_feature (33)..(33): N = G, C, A or T
  misc_feature (43)..(43): N = G, C, A or T
  misc_feature (48)..(48): N = G, C, A or T
  misc_feature (49)..(49): N = G, C, A or T
  misc_feature (76)..(76): N = G, C, A or T
  misc_feature (84)..(84): N = G, C, A or T
  misc_feature (86)..(86): N = G, C, A or T
  misc_feature (99)..(99): N = G, C, A or T
  misc_feature (106)..(106): N = G, C, A or T
atgtnccgannttgttatcctngcatgatntangggaatgatnctctnntgtaaatcaaggtgccgtaggtagttnagggacantntatataacatgcngatatgngtgtgat

SEQ ID NO: 519 - DNA, 90 bp, Nicotiana tabacum
  misc_feature (7)..(7): N = G, C, A or T
  misc_feature (13)..(13): N = G, C, A or T
  misc_feature (34)..(34): N = G, C, A or T
gccgctngtattnatctgttgaagaaattgctgntcagtttgttctgcagcagtatgacaatccactttctaagaagctcaacgatatca

SEQ ID NO: 520 - DNA, 112 bp, Nicotiana tabacum
  misc_feature (8)..(8): N = G, C, A or T
cctaactntaaggccggcaagttcaagaccagtttagcagacacttccagaaaatcgcttgatgggtgaaactgagaagtgaggcttacaaggcaaaccattttgccataca

SEQ ID NO: 521 - DNA, 173 bp, Nicotiana tabacum
  misc_feature (7)..(7): N = G, C, A or T
  misc_feature (9)..(9): N = G, C, A or T
  misc_feature (13)..(13): N = G, C, A or T
  misc_feature (17)..(17): N = G, C, A or T
  misc_feature (18)..(18): N = G, C, A or T
  misc_feature (41)..(41): N = G, C, A or T
  misc_feature (60)..(60): N = G, C, A or T
  misc_feature (86)..(86): N = G, C, A or T
  misc_feature (97)..(97): N = G, C, A or T
  misc_feature (101)..(102): N = G, C, A or T
  misc_feature (108)..(108): N = G, C, A or T
  misc_feature (115)..(115): N = G, C, A or T
  misc_feature (117)..(117): N = G, C, A or T
  misc_feature (119)..(119): N = G, C, A or T
  misc_feature (124)..(124): N = G, C, A or T
  misc_feature (126)..(126): N = G, C, A or T
  misc_feature (134)..(134): N = G, C, A or T
  misc_feature (147)..(147): N = G, C, A or T
ccctctntnatgncccnnagctgctgtgttaaaaatagagnccaagagctcataagaatnatgtccgaggaaggattatactgtgncaaacaaatcnatannttcatngtatatngngnggggnancagtgcancaagtgtggggantggttgctggaaaatataggatcaga

SEQ ID NO: 522 - DNA, 112 bp, Nicotiana tabacum
  misc_feature (1)..(2): N = G, C, A or T
  misc_feature (15)..(15): N = G, C, A or T
  misc_feature (17)..(17): N = G, C, A or T
  misc_feature (20)..(20): N = G, C, A or T
  misc_feature (41)..(41): N = G, C, A or T
  misc_feature (55)..(55): N = G, C, A or T
  misc_feature (106)..(106): N = G, C, A or T
nntaacaacccatgntntangcacaacaagtggagcatatnctaaaagttccggngaagaacttgagaaggaaagagaaagaatggtaccgaaatggagagcgagnggattt

SEQ ID NO: 523 - DNA, 121 bp, Nicotiana tabacum
  misc_feature (5)..(6): N = G, C, A or T
  misc_feature (11)..(12): N = G, C, A or T
  misc_feature (36)..(36): N = G, C, A or T
  misc_feature (40)..(40): N = G, C, A or T
  misc_feature (42)..(42): N = G, C, A or T
  misc_feature (48)..(48): N = G, C, A or T
atgcnncttgnngtaacctgcccgacatttatgccntctngnttatgnttgatgttgcgtattcaagttattgacatttggctgaacaattagttcaagttattagttagtatctagtatg

SEQ ID NO: 524 - DNA, 157 bp, Nicotiana tabacum
  misc_feature (11)..(11): N = G, C, A or T
  misc_feature (17)..(17): N = G, C, A or T
  misc_feature (25)..(25): N = G, C, A or T
  misc_feature (29)..(29): N = G, C, A or T
  misc_feature (35)..(35): N = G, C, A or T
  misc_feature (47)..(47): N = G, C, A or T
  misc_feature (48)..(48): N = G, C, A or T
  misc_feature (56)..(56): N = G, C, A or T
  misc_feature (59)..(59): N = G, C, A or T
  misc_feature (63)..(63): N = G, C, A or T
  misc_feature (69)..(69): N = G, C, A or T
  misc_feature (72)..(72): N = G, C, A or T
  misc_feature (79)..(79): N = G, C, A or T
  misc_feature (92)..(92): N = G, C, A or T
  misc_feature (94)..(94): N = G, C, A or T
  misc_feature (97)..(97): N = G, C, A or T
  misc_feature (99)..(100): N = G, C, A or T
  misc_feature (111)..(111): N = G, C, A or T
  misc_feature (125)..(125): N = G, C, A or T
  misc_feature (133)..(133): N = G, C, A or T
  misc_feature (153)..(153): N = G, C, A or T
tgtgcacatgnctgatngtgcttgntggntgtggntaaggatatcgnngagctagnagnaccntacttnganccgctgncatgatggttcgntngtncnngctgctgaggnaagacactgtgtcngcgggacncaactctccagcgctttatnaatg

SEQ ID NO: 525 - DNA, 91 bp, Nicotiana tabacum
taagggctgctgaacacatcaccaatgactcacaatctttgtggcggactaaattgtttttgtttttcactgaaaaagcctttgctcaccg

SEQ ID NO: 526 - DNA, 111 bp, Nicotiana tabacum
  misc_feature (3)..(3): N = G, C, A or T
  misc_feature (37)..(37): N = G, C, A or T
  misc_feature (47)..(47): N = G, C, A or T
  misc_feature (53)..(54): N = G, C, A or T
  misc_feature (63)..(63): N = G, C, A or T
  misc_feature (66)..(66): N = G, C, A or T
  misc_feature (71)..(73): N = G, C, A or T
  misc_feature (76)..(76): N = G, C, A or T
  misc_feature (79)..(79): N = G, C, A or T
  misc_feature (80)..(80): N = G, C, A or T
  misc_feature (82)..(82): N = G, C, A or T
  misc_feature (84)..(84): N = G, C, A or T
  misc_feature (87)..(88): N = G, C, A or T
  misc_feature (90)..(91): N = G, C, A or T
  misc_feature (94)..(94): N = G, C, A or T
  misc_feature (95)..(95): N = G, C, A or T
  misc_feature (101)..(101): N = G, C, A or T
  misc_feature (103)..(103): N = G, C, A or T
  misc_feature (107)..(107): N = G, C, A or T
  misc_feature (108)..(108): N = G, C, A or T
aantccccctgtaaaacgccgcgccaaaactgggganaaagagcggnccagcnnccgatccancgntgaannnacnggnngngncannannacnngagggnantttnnagg

SEQ ID NO: 527 - DNA, 115 bp, Nicotiana tabacum
  misc_feature (67)..(67): N = G, C, A or T
tctccagaatcctcatcaatgctcagtatgtattagttcttagtgccattttttgagaatggccagnttcaatgtagggtataatttattggctcttttggtttggcatttgtgg

SEQ ID NO: 528 - DNA, 134 bp, Nicotiana tabacum
  misc_feature (63)..(63): N = G, C, A or T
aacgggaccttcgatccagacctcagaaactcgccggaaccgtgacaaaatccaacaacaacnaacggctgaagctctcctttcagaagtgtcgctgctggttgttttcagtgaagcaggggtcattggtttgg

SEQ ID NO: 529 - DNA, 160 bp, Nicotiana tabacum
  misc_feature (1)..(1): N = G, C, A or T
  misc_feature (7)..(7): N = G, C, A or T
  misc_feature (13)..(13): N = G, C, A or T
  misc_feature (23)..(23): N = G, C, A or T
  misc_feature (25)..(25): N = G, C, A or T
  misc_feature (27)..(27): N = G, C, A or T
  misc_feature (32)..(32): N = G, C, A or T
  misc_feature (38)..(38): N = G, C, A or T
  misc_feature (48)..(48): N = G, C, A or T
  misc_feature (51)..(51): N = G, C, A or T
  misc_feature (57)..(57): N = G, C, A or T
  misc_feature (61)..(62): N = G, C, A or T
  misc_feature (77)..(77): N = G, C, A or T
  misc_feature (79)..(79): N = G, C, A or T
  misc_feature (85)..(85): N = G, C, A or T
  misc_feature (87)..(87): N = G, C, A or T
  misc_feature (88)..(88): N = G, C, A or T
  misc_feature (139)..(139): N = G, C, A or T
  misc_feature (141)..(141): N = G, C, A or T
  misc_feature (154)..(154): N = G, C, A or T
ntgagcncaattnctgccaaggncngnacggncgatgntgaactgagnccnagaggnagcnngcacttacccttatntnggggangnngaggtatacaaggtattttagtatggtattctttggaatcatttccgctcngncctagtttgttgnttcctg

SEQ ID NO: 530 - DNA, 79 bp, Nicotiana tabacum
  misc_feature (10)..(10): N = G, C, A or T
  misc_feature (17)..(17): N = G, C, A or T
  misc_feature (19)..(20): N = G, C, A or T
  misc_feature (22)..(22): N = G, C, A or T
  misc_feature (27)..(27): N = G, C, A or T
  misc_feature (29)..(29): N = G, C, A or T
  misc_feature (30)..(34): N = G, C, A or T
  misc_feature (38)..(38): N = G, C, A or T
  misc_feature (41)..(41): N = G, C, A or T
  misc_feature (56)..(56): N = G, C, A or T
  misc_feature (63)..(63): N = G, C, A or T
  misc_feature (66)..(66): N = G, C, A or T
  misc_feature (71)..(71): N = G, C, A or T
cgttggaaanccgtgangnntnggganannnnnnccanaanaagtcgcctagaggngaccgancgngtaancaaccttt

SEQ ID NO: 531 - DNA, 69 bp, Nicotiana tabacum
  misc_feature (5)..(6): N = G, C, A or T
  misc_feature (9)..(9): N = G, C, A or T
  misc_feature (12)..(12): N = G, C, A or T
  misc_feature (13)..(13): N = G, C, A or T
  misc_feature (16)..(16): N = G, C, A or T
  misc_feature (29)..(29): N = G, C, A or T
  misc_feature (33)..(35): N = G, C, A or T
  misc_feature (37)..(37): N = G, C, A or T
  misc_feature (39)..(39): N = G, C, A or T
  misc_feature (65)..(65): N = G, C, A or T
acgcnnctngtnnatnagccactgaaccnaaannntnanctccgcacgatgctgacggcgacggntacg

SEQ ID NO: 532 - DNA, 107 bp, Nicotiana tabacum
  misc_feature (6)..(6): N = G, C, A or T
  misc_feature (12)..(12): N = G, C, A or T
  misc_feature (25)..(25): N = G, C, A or T
  misc_feature (27)..(27): N = G, C, A or T
  misc_feature (29)..(29): N = G, C, A or T
  misc_feature (33)..(33): N = G, C, A or T
  misc_feature (34)..(35): N = G, C, A or T
  misc_feature (40)..(40): N = G, C, A or T
  misc_feature (47)..(47): N = G, C, A or T
  misc_feature (60)..(60): N = G, C, A or T
  misc_feature (77)..(77): N = G, C, A or T
  misc_feature (79)..(79): N = G, C, A or T
  misc_feature (83)..(83): N = G, C, A or T
  misc_feature (85)..(85): N = G, C, A or T
  misc_feature (91)..(91): N = G, C, A or T
  misc_feature (94)..(94): N = G, C, A or T
  misc_feature (100)..(100): N = G, C, A or T
tctttngaaagncccttgcattttngnanaggnnnctttngcttagncttagcaagctgntggggagagtggtcaantntttngncaacanctnagcatncacatgc

SEQ ID NO: 533 - DNA, 97 bp, Nicotiana tabacum
  misc_feature (2)..(2): N = G, C, A or T
  misc_feature (11)..(11): N = G, C, A or T
  misc_feature (18)..(18): N = G, C, A or T
  misc_feature (24)..(24): N = G, C, A or T
  misc_feature (34)..(34): N = G, C, A or T
  misc_feature (37)..(37): N = G, C, A or T
  misc_feature (44)..(44): N = G, C, A or T
  misc_feature (46)..(46): N = G, C, A or T
  misc_feature (55)..(55): N = G, C, A or T
  misc_feature (64)..(64): N = G, C, A or T
  misc_feature (73)..(73): N = G, C, A or T
  misc_feature (78)..(78): N = G, C, A or T
  misc_feature (79)..(79): N = G, C, A or T
  misc_feature (86)..(86): N = G, C, A or T
  misc_feature (92)..(92): N = G, C, A or T
antcccctgtnttcttgntcaccngtgtggaggntgnactgctncntggacaggncacagtggnggactgacngttgnnacagccntattgngagcg

SEQ ID NO: 534 - DNA, 47 bp, Nicotiana tabacum
  misc_feature (45)..(45): N = G, C, A or T
tagcaaggaaagggctctaattcttgctcgactccttgggcggcnta

SEQ ID NO: 535 - DNA, 195 bp, Nicotiana tabacum
  misc_feature (6)..(6): N = G, C, A or T
  misc_feature (12)..(13): N = G, C, A or T
  misc_feature (15)..(15): N = G, C, A or T
  misc_feature (22)..(22): N = G, C, A or T
  misc_feature (39)..(39): N = G, C, A or T
  misc_feature (43)..(43): N = G, C, A or T
  misc_feature (107)..(107): N = G, C, A or T
aaatcnccgatnncnaataccnaaggaacatcaacaaangacntcttactatgaatcttttgtttgatgtttagagcttatttattcttatgatgttgatgatgatnctttaggcatcaaacttcatacttatatctttgttattgtatctggatgttcaacttctaagtgttatgttgttttttagtctttgag

SEQ ID NO: 536 - DNA, 212 bp, Nicotiana tabacum
  misc_feature (1)..(1): N = G, C, A or T
  misc_feature (3)..(3): N = G, C, A or T
  misc_feature (9)..(9): N = G, C, A or T
  misc_feature (12)..(12): N = G, C, A or T
  misc_feature (22)..(22): N = G, C, A or T
  misc_feature (37)..(37): N = G, C, A or T
  misc_feature (42)..(42): N = G, C, A or T
  misc_feature (63)..(63): N = G, C, A or T
  misc_feature (64)..(64): N = G, C, A or T
  misc_feature (104)..(104): N = G, C, A or T
  misc_feature (107)..(107): N = G, C, A or T
nancccccntcnaacaaacccntgctgtacccatttnaccgnttgcaaaagacatgagcctgnnggaaaaaatttacgattctatccttgtgatggtgaaagtnttnatttatgataaatctaccacttttgattggatttcacgatccaaaataaaggatggtgttgcatactataagattttagtttggagatcggtttccctcttgatc

SEQ ID NO: 537 - DNA, 261 bp, Nicotiana tabacum
  misc_feature (1)..(1): N = G, C, A or T
  misc_feature (10)..(10): N = G, C, A or T
  misc_feature (11)..(11): N = G, C, A or T
  misc_feature (31)..(31): N = G, C, A or T
  misc_feature (32)..(32): N = G, C, A or T
  misc_feature (36)..(36): N = G, C, A or T
  misc_feature (71)..(72): N = G, C, A or T
  misc_feature (80)..(80): N = G, C, A or T
  misc_feature (202)..(202): N = G, C, A or T
naccccaatnnaacaagcccgggtaccgagnntccnatatgatcgagaacttttcaggtttggtgcccgannttaggttnctcttctgtctcggcaatggctttaatggccttcagtgccagatcaaattcctcatcttcacatatcattccgattactggcccattgatgtgagtaggcagagaattgttcatcatattangggcctcttcatccctaaacattatttccttgacattgataaggtcttccactgctctc

SEQ ID NO: 538 - DNA, 55 bp, Nicotiana tabacum
  misc_feature (5)..(5): N = G, C, A or T
  misc_feature (19)..(19): N = G, C, A or T
  misc_feature (37)..(37): N = G, C, A or T
  misc_feature (39)..(39): N = G, C, A or T
  misc_feature (48)..(48): N = G, C, A or T
ttatntatattgttagacnttggagtctgaaattagngntgtttgggntgtacgc

SEQ ID NO: 539 - DNA, 55 bp, Nicotiana tabacum
  misc_feature (2)..(2): N = G, C, A or T
  misc_feature (10)..(10): N = G, C, A or T
  misc_feature (15)..(15): N = G, C, A or T
  misc_feature (55)..(55): N = G, C, A or T
gnagaaatcnaatcnaagtagaggaagggcgatactgggaaggggggccttagcn

SEQ ID NO: 540 - DNA, 92 bp, Nicotiana tabacum
  misc_feature (4)..(4): N = G, C, A or T
  misc_feature (15)..(15): N = G, C, A or T
  misc_feature (20)..(20): N = G, C, A or T
  misc_feature (26)..(26): N = G, C, A or T
  misc_feature (30)..(31): N = G, C, A or T
  misc_feature (34)..(34): N = G, C, A or T
  misc_feature (45)..(45): N = G, C, A or T
  misc_feature (55)..(55): N = G, C, A or T
  misc_feature (61)..(61): N = G, C, A or T
  misc_feature (70)..(70): N = G, C, A or T
  misc_feature (75)..(75): N = G, C, A or T
  misc_feature (83)..(83): N = G, C, A or T
gggnatgtcaagtangacantatggncgannctngagcgtgcacnatgtctattncagcancacattgangatanctgaggantgtcgccac

SEQ ID NO: 541 - DNA, 126 bp, Nicotiana tabacum
  misc_feature (6)..(7): N = G, C, A or T
  misc_feature (12)..(12): N = G, C, A or T
  misc_feature (28)..(28): N = G, C, A or T
  misc_feature (41)..(41): N = G, C, A or T
  misc_feature (53)..(53): N = G, C, A or T
  misc_feature (73)..(73): N = G, C, A or T
  misc_feature (89)..(89): N = G, C, A or T
  misc_feature (96)..(96): N = G, C, A or T
  misc_feature (99)..(101): N = G, C, A or T
aagttnngcgantatccttcgctgagtntaaatctatacantcttgaatcctnattacactgttagagagatnatgaaaaaaggacctntgaatcnaannncctactattttgcttcgcctttacc

SEQ ID NO: 542 - DNA, 193 bp, Nicotiana tabacum
  misc_feature (2)..(3): N = G, C, A or T
  misc_feature (5)..(6): N = G, C, A or T
  misc_feature (103)..(103): N = G, C, A or T
  misc_feature (155)..(155): N = G, C, A or T
cnntnnacatttaacaagtgagagtttgaagccctttcaacttgcgcatgtgaaagcattgaatcttgcaaaaggggaatgcaggatgataaagaaactctgncatctgtatggaataaagctattgaaatgtgcgaatccaattcacttgcaanctttttgagaagacaagggaagttgtcatcaattcgtc

SEQ ID NO: 543 - DNA, 115 bp, Nicotiana tabacum
  misc_feature (2)..(2): N = G, C, A or T
  misc_feature (11)..(11): N = G, C, A or T
  misc_feature (12)..(12): N = G, C, A or T
  misc_feature (26)..(26): N = G, C, A or T
  misc_feature (31)..(31): N = G, C, A or T
  misc_feature (34)..(34): N = G, C, A or T
  misc_feature (40)..(40): N = G, C, A or T
  misc_feature (45)..(45): N = G, C, A or T
  misc_feature (53)..(53): N = G, C, A or T
  misc_feature (61)..(61): N = G, C, A or T
  misc_feature (64)..(64): N = G, C, A or T
  misc_feature (66)..(66): N = G, C, A or T
  misc_feature (67)..(67): N = G, C, A or T
  misc_feature (70)..(70): N = G, C, A or T
  misc_feature (73)..(73): N = G, C, A or T
  misc_feature (78)..(78): N = G, C, A or T
  misc_feature (80)..(80): N = G, C, A or T
  misc_feature (82)..(82): N = G, C, A or T
  misc_feature (88)..(88): N = G, C, A or T
  misc_feature (106)..(106): N = G, C, A or T
  misc_feature (112)..(112): N = G, C, A or T
cnctttgaagnnccaccatcgtacanggganaanacggcnaccanaatccggncaaattcnggngnnctnccngaacncntntttttntttgggtgccaccatcgnaccggncac

SEQ ID NO: 544 - DNA, 155 bp, Nicotiana tabacum
  misc_feature (4)..(4): N = G, C, A or T
  misc_feature (12)..(12): N = G, C, A or T
  misc_feature (16)..(16): N = G, C, A or T
  misc_feature (24)..(24): N = G, C, A or T
  misc_feature (34)..(34): N = G, C, A or T
  misc_feature (49)..(50): N = G, C, A or T
  misc_feature (58)..(58): N = G, C, A or T
  misc_feature (70)..(70): N = G, C, A or T
  misc_feature (72)..(72): N = G, C, A or T
  misc_feature (77)..(77): N = G, C, A or T
  misc_feature (81)..(82): N = G, C, A or T
  misc_feature (85)..(87): N = G, C, A or T
  misc_feature (89)..(89): N = G, C, A or T
  misc_feature (98)..(98): N = G, C, A or T
  misc_feature (104)..(104): N = G, C, A or T
  misc_feature (107)..(107): N = G, C, A or T
  misc_feature (109)..(109): N = G, C, A or T
  misc_feature (113)..(113): N = G, C, A or T
  misc_feature (115)..(115): N = G, C, A or T
  misc_feature (123)..(124): N = G, C, A or T
  misc_feature (125)..(125): N = G, C, A or T
  misc_feature (128)..(130): N = G, C, A or T
  misc_feature (132)..(133): N = G, C, A or T
  misc_feature (136)..(137): N = G, C, A or T
  misc_feature (140)..(140): N = G, C, A or T
  misc_feature (145)..(145): N = G, C, A or T
  misc_feature (150)..(150): N = G, C, A or T
  misc_feature (154)..(154): N = G, C, A or T
ctgncaaacccngggnagtcaggnaaacgtccancatggatctggatcnnggcacagngaaggcaacgcnancgacntagnnacnnnangactgtatnaaacanagncnggantnatactgannncannnannagnntangaagnttcanggcnc

SEQ ID NO: 545 - DNA, 565 bp, Nicotiana tabacum
  misc_feature (4)..(5): N = G, C, A or T
  misc_feature (8)..(8): N = G, C, A or T
  misc_feature (10)..(10): N = G, C, A or T
  misc_feature (14)..(14): N = G, C, A or T
  misc_feature (21)..(21): N = G, C, A or T
  misc_feature (32)..(32): N = G, C, A or T
  misc_feature (33)..(33): N = G, C, A or T
  misc_feature (38)..(38): N = G, C, A or T
  misc_feature (44)..(44): N = G, C, A or T
  misc_feature (50)..(50): N = G, C, A or T
  misc_feature (52)..(52): N = G, C, A or T
  misc_feature (54)..(54): N = G, C, A or T
  misc_feature (55)..(57): N = G, C, A or T
  misc_feature (59)..(59): N = G, C, A or T
  misc_feature (61)..(62): N = G, C, A or T
  misc_feature (64)..(68): N = G, C, A or T
  misc_feature (71)..(72): N = G, C, A or T
  misc_feature (80)..(80): N = G, C, A or T
  misc_feature (85)..(85): N = G, C, A or T
  misc_feature (86)..(86): N = G, C, A or T
  misc_feature (95)..(96): N = G, C, A or T
  misc_feature (98)..(101): N = G, C, A or T
  misc_feature (104)..(104): N = G, C, A or T
  misc_feature (106)..(106): N = G, C, A or T
  misc_feature (116)..(116): N = G, C, A or T
  misc_feature (128)..(128): N = G, C, A or T
  misc_feature (130)..(130): N = G, C, A or T
  misc_feature (131)..(131): N = G, C, A or T
  misc_feature (135)..(135): N = G, C, A or T
  misc_feature (142)..(143): N = G, C, A or T
  misc_feature (145)..(145): N = G, C, A or T
  misc_feature (159)..(161): N = G, C, A or T
  misc_feature (163)..(163): N = G, C, A or T
  misc_feature (165)..(165): N = G, C, A or T
  misc_feature (167)..(168): N = G, C, A or T
  misc_feature (170)..(170): N = G, C, A or T
  misc_feature (172)..(172): N = G, C, A or T
  misc_feature (174)..(174): N = G, C, A or T
  misc_feature (178)..(178): N = G, C, A or T
  misc_feature (182)..(183): N = G, C, A or T
  misc_feature (188)..(189): N = G, C, A or T
  misc_feature (191)..(192): N = G, C, A or T
  misc_feature (195)..(196): N = G, C, A or T
  misc_feature (198)..(198): N = G, C, A or T
  misc_feature (205)..(205): N = G, C, A or T
  misc_feature (207)..(207): N = G, C, A or T
  misc_feature (213)..(215): N = G, C, A or T
  misc_feature (218)..(218): N = G, C, A or T
  misc_feature (223)..(224): N = G, C, A or T
  misc_feature (226)..(227): N = G, C, A or T
  misc_feature (230)..(230): N = G, C, A or T
  misc_feature (231)..(231): N = G, C, A or T
  misc_feature (236)..(238): N = G, C, A or T
  misc_feature (247)..(247): N = G, C, A or T
  misc_feature (253)..(253): N = G, C, A or T
  misc_feature (258)..(258): N = G, C, A or T
  misc_feature (260)..(260): N = G, C, A or T
  misc_feature (266)..(266): N = G, C, A or T
  misc_feature (270)..(270): N = G, C, A or T
  misc_feature (274)..(274): N = G, C, A or T
  misc_feature (278)..(278): N = G, C, A or T
  misc_feature (280)..(280): N = G, C, A or T
  misc_feature (282)..(282): N = G, C, A or T
  misc_feature (284)..(285): N = G, C, A or T
  misc_feature (288)..(288): N = G, C, A or T
  misc_feature (291)..(291): N = G, C, A or T
  misc_feature (294)..(294): N = G, C, A or T
  misc_feature (295)..(295): N = G, C, A or T
  misc_feature (300)..(300): N = G, C, A or T
  misc_feature (301)..(302): N = G, C, A or T
  misc_feature (304)..(305): N = G, C, A or T
  misc_feature (308)..(308): N = G, C, A or T
  misc_feature (310)..(312): N = G, C, A or T
  misc_feature (315)..(316): N = G, C, A or T
  misc_feature (319)..(319): N = G, C, A or T
  misc_feature (320)..(321): N = G, C, A or T
  misc_feature (323)..(323): N = G, C, A or T
  misc_feature (326)..(326): N = G, C, A or T
  misc_feature (329)..(329): N = G, C, A or T
  misc_feature (330)..(330): N = G, C, A or T
  misc_feature (333)..(333): N = G, C, A or T
  misc_feature (334)..(336): N = G, C, A or T
  misc_feature (341)..(342): N = G, C, A or T
  misc_feature (344)..(344): N = G, C, A or T
  misc_feature (348)..(349): N = G, C, A or T
  misc_feature (352)..(352): N = G, C, A or T
  misc_feature (359)..(359): N = G, C, A or T
  misc_feature (360)..(364): N = G, C, A or T
  misc_feature (366)..(366): N = G, C, A or T
  misc_feature (369)..(371): N = G, C, A or T
  misc_feature (374)..(376): N = G, C, A or T
  misc_feature (387)..(388): N = G, C, A or T
  misc_feature (390)..(390): N = G, C, A or T
  misc_feature (394)..(394): N = G, C, A or T
  misc_feature (397)..(397): N = G, C, A or T
  misc_feature (399)..(399): N = G, C, A or T
  misc_feature (400)..(400): N = G, C, A or T
  misc_feature (402)..(402): N = G, C, A or T
  misc_feature (404)..(404): N = G, C, A or T
  misc_feature (409)..(409): N = G, C, A or T
  misc_feature (413)..(415): N = G, C, A or T
  misc_feature (425)..(425): N = G, C, A or T
  misc_feature (426)..(426): N = G, C, A or T
  misc_feature (429)..(429): N = G, C, A or T
  misc_feature (442)..(442): N = G, C, A or T
  misc_feature (463)..(463): N = G, C, A or T
  misc_feature (465)..(465): N = G, C, A or T
  misc_feature (480)..(480): N = G, C, A or T
  misc_feature (487)..(487): N = G, C, A or T
  misc_feature (490)..(490): N = G, C, A or T
  misc_feature (494)..(494): N = G, C, A or T
  misc_feature (509)..(509): N = G, C, A or T
  misc_feature (527)..(527): N = G, C, A or T
ttgnngtngnaggnggaacgnagggcagtttnnttccnagggancaccancnannnngntnntnnnnnaannttttttgntatanncacacgganntnnnnacnancgaggggggnttttttctacantnnattncgtgggnnanaatcaaacgatgannncngngnntncngngganatgnncgacnngnntanngntcgaccncnaccacnnnacnggagnngnnganngtcgnnnctcattaangagagnttaancngagtgnagtnaatnacgncnanannganatntannttttnnncnnggncnnntanntannntnacntannacnnnngtatnntncggnngcnttcccannnnnntntannnctnnntcgaataaganncncggncangnncnantcccngctnnncaaaacacgnnagnggagggtccgcgnaggcagtgaatcccgtgattnanctacaagtgccttgngtgcagntgncaanaacaggaaatacttntggaataagtgatgcatncagaaatgctacttctggctccaaagttgctgactgca

SEQ ID NO: 546 - DNA, 252 bp, Nicotiana tabacum
gaggtacatagcagctaccaggcagtgattcaaagtagagctgcattccgttcgtaggccttagaataacttcctagttcctatatactgtttccattttatttcagacagtattgtaattcctttccaaatattgtatttagtataatcccgaagctcatgtacttgtgacttcacatattgggatattcgcgttagatgttggttttagacttattgtgtttgtatcagaattgcctttacgttttgtta

SEQ ID NO: 547 - DNA, 158 bp, Nicotiana tabacum
  misc_feature (20)..(20): N = G, C, A or T
  misc_feature (22)..(22): N = G, C, A or T
  misc_feature (30)..(30): N = G, C, A or T
  misc_feature (33)..(33): N = G, C, A or T
  misc_feature (35)..(35): N = G, C, A or T
  misc_feature (40)..(40): N = G, C, A or T
  misc_feature (44)..(45): N = G, C, A or T
  misc_feature (48)..(48): N = G, C, A or T
  misc_feature (52)..(53): N = G, C, A or T
  misc_feature (59)..(59): N = G, C, A or T
  misc_feature (72)..(72): N = G, C, A or T
  misc_feature (86)..(86): N = G, C, A or T
  misc_feature (87)..(90): N = G, C, A or T
  misc_feature (98)..(98): N = G, C, A or T
  misc_feature (111)..(112): N = G, C, A or T
  misc_feature (123)..(123): N = G, C, A or T
  misc_feature (126)..(126): N = G, C, A or T
  misc_feature (131)..(131): N = G, C, A or T
  misc_feature (134)..(135): N = G, C, A or T
  misc_feature (137)..(137): N = G, C, A or T
  misc_feature (143)..(143): N = G, C, A or T
ctctttggaaagccctcatngngtgagaanacnangcggnaaannctnttgnnacgccnattactcaggacncatcatttttttcnnnnncacgctanaagggggactatnnggcctaagganatncaggnggnnangcgtantacgggagaaagggc

SEQ ID NO: 548 - DNA, 67 bp, Nicotiana tabacum
  misc_feature (6)..(6): N = G, C, A or T
  misc_feature (65)..(65): N = G, C, A or T
cctttngaggcggcatggatgtagcagggaaaggctctaattcttgctcgactccttgggcggcnta

SEQ ID NO: 549 - DNA, 72 bp, Nicotiana tabacum
  misc_feature (3)..(3): N = G, C, A or T
  misc_feature (7)..(7): N = G, C, A or T
  misc_feature (19)..(20): N = G, C, A or T
  misc_feature (30)..(30): N = G, C, A or T
  misc_feature (61)..(61): N = G, C, A or T
ccnttgntgagcctatctnngttccgaaantgaaaccgacgctaactttctccactagtcngcctttcagta

SEQ ID NO: 550 - DNA, 100 bp, Nicotiana tabacum
  misc_feature (7)..(7): N = G, C, A or T
  misc_feature (41)..(41): N = G, C, A or T
  misc_feature (43)..(43): N = G, C, A or T
  misc_feature (47)..(47): N = G, C, A or T
  misc_feature (58)..(58): N = G, C, A or T
  misc_feature (69)..(69): N = G, C, A or T
  misc_feature (71)..(71): N = G, C, A or T
  misc_feature (73)..(74): N = G, C, A or T
  misc_feature (80)..(81): N = G, C, A or T
  misc_feature (90)..(90): N = G, C, A or T
  misc_feature (93)..(93): N = G, C, A or T
ctttggnaagaccgcgaagttgaaggacagggagagatgangngcgnctccttagggnacgatccctangncnnaccgcnntcacacagngtntggggta

SEQ ID NO: 551 - DNA, 142 bp, Nicotiana tabacum
  misc_feature (4)..(4): N = G, C, A or T
  misc_feature (7)..(7): N = G, C, A or T
  misc_feature (29)..(29): N = G, C, A or T
  misc_feature (35)..(35): N = G, C, A or T
  misc_feature (38)..(38): N = G, C, A or T
  misc_feature (76)..(76): N = G, C, A or T
  misc_feature (114)..(114): N = G, C, A or T
  misc_feature (125)..(126): N = G, C, A or T
gttnatnatgcgattctttttctgcctanggtggnagngaccaaggaattgcaggaccaattttttttgggttatntatccctgctctaagggcacttcattggtataggttgnaagtgtaaggnntattgttggctggcta

SEQ ID NO: 552 - DNA, 475 bp, Nicotiana tabacum
  misc_feature (4)..(5): N = G, C, A or T
  misc_feature (9)..(9): N = G, C, A or T
  misc_feature (13)..(14): N = G, C, A or T
  misc_feature (34)..(34): N = G, C, A or T
  misc_feature (42)..(42): N = G, C, A or T
  misc_feature (50)..(50): N = G, C, A or T
  misc_feature (55)..(55): N = G, C, A or T
  misc_feature (61)..(61): N = G, C, A or T
  misc_feature (75)..(76): N = G, C, A or T
  misc_feature (83)..(83): N = G, C, A or T
  misc_feature (87)..(87): N = G, C, A or T
  misc_feature (96)..(96): N = G, C, A or T
  misc_feature (102)..(102): N = G, C, A or T
  misc_feature (104)..(104): N = G, C, A or T
  misc_feature (113)..(114): N = G, C, A or T
  misc_feature (117)..(117): N = G, C, A or T
  misc_feature (125)..(125): N = G, C, A or T
  misc_feature (132)..(132): N = G, C, A or T
  misc_feature (136)..(136): N = G, C, A or T
  misc_feature (140)..(140): N = G, C, A or T
  misc_feature (148)..(148): N = G, C, A or T
  misc_feature (150)..(150): N = G, C, A or T
  misc_feature (156)..(156): N = G, C, A or T
  misc_feature (158)..(158): N = G, C, A or T
  misc_feature (160)..(160): N = G, C, A or T
  misc_feature (162)..(162): N = G, C, A or T
  misc_feature (169)..(169): N = G, C, A or T
  misc_feature (174)..(174): N = G, C, A or T
  misc_feature (181)..(181): N = G, C, A or T
  misc_feature (183)..(183): N = G, C, A or T
  misc_feature (185)..(185): N = G, C, A or T
  misc_feature (190)..(190): N = G, C, A or T
  misc_feature (194)..(194): N = G, C, A or T
  misc_feature (198)..(198): N = G, C, A or T
  misc_feature (199)..(199): N = G, C, A or T
  misc_feature (204)..(205): N = G, C, A or T
  misc_feature (207)..(208): N = G, C, A or T
  misc_feature (213)..(213): N = G, C, A or T
  misc_feature (218)..(219): N = G, C, A or T
  misc_feature (224)..(224): N = G, C, A or T
  misc_feature (226)..(226): N = G, C, A or T
  misc_feature (229)..(229): N = G, C, A or T
  misc_feature (236)..(236): N = G, C, A or T
  misc_feature (249)..(249): N = G, C, A or T
  misc_feature (251)..(251): N = G, C, A or T
  misc_feature (253)..(253): N = G, C, A or T
  misc_feature (256)..(256): N = G, C, A or T
  misc_feature (257)..(257): N = G, C, A or T
  misc_feature (259)..(259): N = G, C, A or T
  misc_feature (261)..(261): N = G, C, A or T
  misc_feature (266)..(266): N = G, C, A or T
  misc_feature (269)..(269): N = G, C, A or T
  misc_feature (270)..(271): N = G, C, A or T
  misc_feature (274)..(274): N = G, C, A or T
  misc_feature (277)..(277): N = G, C, A or T
  misc_feature (280)..(281): N = G, C, A or T
  misc_feature (283)..(283): N = G, C, A or T
  misc_feature (285)..(285): N = G, C, A or T
  misc_feature (288)..(288): N = G, C, A or T
  misc_feature (291)..(293): N = G, C, A or T
  misc_feature (296)..(296): N = G, C, A or T
  misc_feature (308)..(308): N = G, C, A or T
  misc_feature (318)..(318): N = G, C, A or T
  misc_feature (321)..(321): N = G, C, A or T
  misc_feature (324)..(325): N = G, C, A or T
  misc_feature (376)..(376): N = G, C, A or T
gaanncccngacnnatttgggaaaaccacctgangaagaaangatatgtngcatntaaagntgacttatgagtannaggctangatntgttaccanacccgngntggtaatcnnagnactatatngaacatnttanttgnaccttctnantacatnancngntatgagnaccantattacncngnacttnattnacanntgcgnngnnagganattannggtgncnctngatcganttctgactcatantntnacnnancnaatgnacnnntcnaangtnntnanatnatnnntcncgtgaatcgagntttagctatngcngcnnaccacgtgaagaagaaatgatttgttgcacgtaaagctgacttatgagacngaggttatgatatgttaccatacccgagtttgtaatcttcgcactatattgaacatctagttgtagcagttttttttatcatctgctatttgtgcatta

SEQ ID NO: 553 - DNA, 129 bp, Nicotiana tabacum
  misc_feature (2)..(2): N = G, C, A or T
  misc_feature (8)..(8): N = G, C, A or T
tnaaaaanaatggatagcactaacacaaaggcggcaagttcaagaccagctttgcagacacttccagaaaatcgcttgatgggtgaaactgagaagtgaggcttacaaggcaaaccattttgccataca

SEQ ID NO: 554 - DNA, 70 bp, Nicotiana tabacum
  misc_feature (6)..(6): N = G, C, A or T
  misc_feature (11)..(11): N = G, C, A or T
  misc_feature (22)..(22): N = G, C, A or T
  misc_feature (25)..(25): N = G, C, A or T
  misc_feature (27)..(27): N = G, C, A or T
  misc_feature (34)..(34): N = G, C, A or T
  misc_feature (37)..(37): N = G, C, A or T
  misc_feature (41)..(41): N = G, C, A or T
  misc_feature (44)..(44): N = G, C, A or T
  misc_feature (49)..(49): N = G, C, A or T
  misc_feature (51)..(51): N = G, C, A or T
  misc_feature (58)..(58): N = G, C, A or T
tgcccngtgcntggttgtggcnagngngctagangantccngangaggngnagaccgngaaacccaccga

SEQ ID NO: 555 - DNA, 86 bp, Nicotiana tabacum
  misc_feature (14)..(15): N = G, C, A or T
  misc_feature (21)..(21): N = G, C, A or T
  misc_feature (22)..(23): N = G, C, A or T
  misc_feature (28)..(28): N = G, C, A or T
  misc_feature (31)..(31): N = G, C, A or T
  misc_feature (34)..(34): N = G, C, A or T
  misc_feature (45)..(45): N = G, C, A or T
  misc_feature (50)..(50): N = G, C, A or T
  misc_feature (74)..(74): N = G, C, A or T
  misc_feature (76)..(77): N = G, C, A or T
  misc_feature (84)..(84): N = G, C, A or T
ctttggaagggccnnaagctnnngggantcngcnataggggaatnaaccnatgtgcatgcaacaaacaagccgntnnatgtcanga

SEQ ID NO: 556 - DNA, 103 bp, Nicotiana tabacum
  misc_feature (7)..(8): N = G, C, A or T
  misc_feature (12)..(12): N = G, C, A or T
  misc_feature (25)..(25): N = G, C, A or T
  misc_feature (35)..(35): N = G, C, A or T
  misc_feature (55)..(55): N = G, C, A or T
  misc_feature (58)..(58): N = G, C, A or T
  misc_feature (73)..(73): N = G, C, A or T
  misc_feature (78)..(78): N = G, C, A or T
cttcgtnnagancagggattgttgntttccagcgnacgattcgaggttcggattnggnatttcgatgtctcantccangggattgttgctttgtttagcccga

SEQ ID NO: 557 - DNA, 131 bp, Nicotiana tabacum
  misc_feature (2)..(2): N = G, C, A or T
  misc_feature (5)..(5): N = G, C, A or T
  misc_feature (7)..(7): N = G, C, A or T
  misc_feature (9)..(9): N = G, C, A or T
  misc_feature (14)..(14): N = G, C, A or T
  misc_feature (21)..(21): N = G, C, A or T
  misc_feature (23)..(23): N = G, C, A or T
  misc_feature (28)..(29): N = G, C, A or T
  misc_feature (30)..(30): N = G, C, A or T
  misc_feature (32)..(32): N = G, C, A or T
  misc_feature (39)..(39): N = G, C, A or T
  misc_feature (52)..(52): N = G, C, A or T
  misc_feature (57)..(57): N = G, C, A or T
  misc_feature (58)..(59): N = G, C, A or T
  misc_feature (71)..(71): N = G, C, A or T
  misc_feature (83)..(83): N = G, C, A or T
  misc_feature (85)..(85): N = G, C, A or T
  misc_feature (86)..(86): N = G, C, A or T
  misc_feature (89)..(90): N = G, C, A or T
  misc_feature (93)..(93): N = G, C, A or T
  misc_feature (105)..(105): N = G, C, A or T
  misc_feature (125)..(126): N = G, C, A or T
cntgncntnccgcngctcctncngtgannncngctgctntacggagctgatnctgtnnntgtcaaggaggncgacacaggtangnnccnncgngaaagtgtgtanatgacaatatcaagattgtnnggaga

SEQ ID NO: 558 - DNA, 172 bp, Nicotiana tabacum
  misc_feature (8)..(8): N = G, C, A or T
  misc_feature (10)..(10): N = G, C, A or T
  misc_feature (22)..(22): N = G, C, A or T
  misc_feature (26)..(26): N = G, C, A or T
  misc_feature (44)..(44): N = G, C, A or T
  misc_feature (59)..(59): N = G, C, A or T
  misc_feature (60)..(61): N = G, C, A or T
  misc_feature (64)..(65): N = G, C, A or T
  misc_feature (76)..(76): N = G, C, A or T
  misc_feature (79)..(79): N = G, C, A or T
  misc_feature (84)..(84): N = G, C, A or T
  misc_feature (86)..(86): N = G, C, A or T
  misc_feature (87)..(87): N = G, C, A or T
  misc_feature (91)..(91): N = G, C, A or T
  misc_feature (96)..(96): N = G, C, A or T
  misc_feature (105)..(105): N = G, C, A or T
  misc_feature (109)..(110): N = G, C, A or T
  misc_feature (113)..(113): N = G, C, A or T
  misc_feature (116)..(116): N = G, C, A or T
  misc_feature (118)..(118): N = G, C, A or T
  misc_feature (127)..(127): N = G, C, A or T
  misc_feature (131)..(131): N = G, C, A or T
  misc_feature (138)..(138): N = G, C, A or T
  misc_feature (144)..(144): N = G, C, A or T
  misc_feature (152)..(152): N = G, C, A or T
  misc_feature (162)..(162): N = G, C, A or T
  misc_feature (164)..(164): N = G, C, A or T
ctttgganantccgaagagatnaggnagacgaccctgatcctgnaggctgagcaagaannnagnncacaatgagcnatngctangnnagcngacangcaaactanctcnnaanctntnctggtgatnccgntgatcanggaggnagccttcnaccagacagncntgacagga

SEQ ID NO: 559 - DNA, 66 bp, Nicotiana tabacum
  misc_feature (2)..(2): N = G, C, A or T
  misc_feature (6)..(6): N = G, C, A or T
  misc_feature (8)..(8): N = G, C, A or T
cncttngncacagccctatttgtatttatgtttgaattttatgacaaaatggtcgtatttttctca

SEQ ID NO: 560 - DNA, 113 bp, Nicotiana tabacum
  misc_feature (11)..(11): N = G, C, A or T
  misc_feature (14)..(14): N = G, C, A or T
  misc_feature (33)..(34): N = G, C, A or T
  misc_feature (38)..(38): N = G, C, A or T
  misc_feature (60)..(60): N = G, C, A or T
  misc_feature (82)..(82): N = G, C, A or T
  misc_feature (84)..(84): N = G, C, A or T
  misc_feature (95)..(95): N = G, C, A or T
acgacgcgtanaanatctgaaggatacctatgnncaancgaaccaatgcacggatatccntttataacccaaatcttcagtngngaatatctctncagttccttttctattgc

SEQ ID NO: 561 - DNA, 111 bp, Nicotiana tabacum
  misc_feature (8)..(8): N = G, C, A or T
  misc_feature (15)..(16): N = G, C, A or T
  misc_feature (39)..(39): N = G, C, A or T
  misc_feature (59)..(59): N = G, C, A or T
  misc_feature (102)..(103): N = G, C, A or T
cgagtttnatggcgnngcgatgtggacattcgttgtggnggcctaatgctgaaaagggntattgatatggcaagaggaaccctctgcaatgcagaaattganngtggctcc

SEQ ID NO: 562 - DNA, 58 bp, Nicotiana tabacum
  misc_feature (3)..(3): N = G, C, A or T
  misc_feature (11)..(11): N = G, C, A or T
  misc_feature (13)..(13): N = G, C, A or T
  misc_feature (30)..(31): N = G, C, A or T
  misc_feature (33)..(33): N = G, C, A or T
  misc_feature (44)..(44): N = G, C, A or T
  misc_feature (46)..(46): N = G, C, A or T
acntgacttcntncaaccagccatctatannanaggaaaaatantntgaggattccca

SEQ ID NO: 563 - DNA, 242 bp, Nicotiana tabacum
  misc_feature (7)..(7): N = G, C, A or T
  misc_feature (12)..(12): N = G, C, A or T
  misc_feature (15)..(15): N = G, C, A or T
  misc_feature (21)..(21): N = G, C, A or T
  misc_feature (26)..(26): N = G, C, A or T
  misc_feature (30)..(30): N = G, C, A or T
  misc_feature (32)..(32): N = G, C, A or T
  misc_feature (39)..(39): N = G, C, A or T
  misc_feature (40)..(40): N = G, C, A or T
  misc_feature (42)..(42): N = G, C, A or T
  misc_feature (47)..(47): N = G, C, A or T
  misc_feature (50)..(50): N = G, C, A or T
  misc_feature (55)..(55): N = G, C, A or T
  misc_feature (63)..(63): N = G, C, A or T
  misc_feature (64)..(64): N = G, C, A or T
  misc_feature (77)..(77): N = G, C, A or T
  misc_feature (81)..(81): N = G, C, A or T
  misc_feature (85)..(85): N = G, C, A or T
  misc_feature (99)..(99): N = G, C, A or T
  misc_feature (103)..(103): N = G, C, A or T
  misc_feature (116)..(116): N = G, C, A or T
  misc_feature (128)..(128): N = G, C, A or T
  misc_feature (140)..(140): N = G, C, A or T
  misc_feature (151)..(152): N = G, C, A or T
  misc_feature (161)..(161): N = G, C, A or T
  misc_feature (168)..(168): N = G, C, A or T
  misc_feature (172)..(172): N = G, C, A or T
  misc_feature (174)..(174): N = G, C, A or T
  misc_feature (175)..(175): N = G, C, A or T
  misc_feature (180)..(180): N = G, C, A or T
  misc_feature (184)..(184): N = G, C, A or T
  misc_feature (187)..(187): N = G, C, A or T
  misc_feature (189)..(189): N = G, C, A or T
  misc_feature (190)..(190): N = G, C, A or T
  misc_feature (192)..(192): N = G, C, A or T
  misc_feature (193)..(193): N = G, C, A or T
  misc_feature (201)..(201): N = G, C, A or T
  misc_feature (208)..(208): N = G, C, A or T
  misc_feature (211)..(211): N = G, C, A or T
  misc_feature (215)..(215): N = G, C, A or T
  misc_feature (220)..(221): N = G, C, A or T
  misc_feature (229)..(229): N = G, C, A or T
  misc_feature (236)..(236): N = G, C, A or T
ctgtccnttttntgngacctngtgcnggcntnctctganngngcccngtnagcgnccaactcnnatcaagctccttncaantgantgaggacatgatgnggtnatttactcgtgangaaaggcagctnattcctgacccnatggaagcagnnaggaaatcngctcctngctncnnactgngcanggntnnanngtactcgnccatacngangtcncacannattgctanattgttnctagca

SEQ ID NO: 564 - DNA, 157 bp, Nicotiana tabacum
  misc_feature (1)..(1): N = G, C, A or T
  misc_feature (37)..(37): N = G, C, A or T
  misc_feature (94)..(94): N = G, C, A or T
nctggcagtaccaaaggtcctatggattgttacttcncgcaaaaatctggagataaggaaggaaaaagtggtaatcctcaaattgatgccaaancgattttgagggatcgtgcaattacaatgtttgcgcggtggatgtatgatgcaggtcttcctt

SEQ ID NO: 565 - DNA, 167 bp, Nicotiana tabacum
  misc_feature (2)..(3): N = G, C, A or T
  misc_feature (20)..(20): N = G, C, A or T
  misc_feature (22)..(22): N = G, C, A or T
  misc_feature (26)..(26): N = G, C, A or T
  misc_feature (32)..(32): N = G, C, A or T
  misc_feature (35)..(35): N = G, C, A or T
  misc_feature (45)..(45): N = G, C, A or T
  misc_feature (46)..(46): N = G, C, A or T
  misc_feature (50)..(50): N = G, C, A or T
  misc_feature (52)..(52): N = G, C, A or T
  misc_feature (57)..(57): N = G, C, A or T
  misc_feature (62)..(62): N = G, C, A or T
  misc_feature (66)..(67): N = G, C, A or T
  misc_feature (68)..(69): N = G, C, A or T
  misc_feature (72)..(72): N = G, C, A or T
  misc_feature (76)..(76): N = G, C, A or T
  misc_feature (81)..(81): N = G, C, A or T
  misc_feature (96)..(96): N = G, C, A or T
  misc_feature (106)..(106): N = G, C, A or T
  misc_feature (112)..(112): N = G, C, A or T
  misc_feature (115)..(115): N = G, C, A or T
  misc_feature (119)..(119): N = G, C, A or T
  misc_feature (128)..(128): N = G, C, A or T
  misc_feature (136)..(137): N = G, C, A or T
gnngctagcagctcggagtntnttgnggtccngcngaaatttttnntggngnacacnggaanttgnnnnatntctnatggngtatggtaagaactnattttttganattganggncganatgttcttngggggggnnccgtcacacctgtcacttcatttcattttt

SEQ ID NO: 566 - DNA, 24 bp, Nicotiana tabacum
aaaggaaactagttggaacttgtt

SEQ ID NO: 567 - DNA, 34 bp, Nicotiana tabacum
aagatgatgagcagattgcaaggaggaagcacct

SEQ ID NO: 568 - DNA, 71 bp, Nicotiana tabacum
actacgactggcaaagatcaagttgtagtaactaataaatactcgagagagaacagtggaaatctttttgt

SEQ ID NO: 569 - DNA, 103 bp, Nicotiana tabacum
  misc_feature (2)..(2): N = G, C, A or T
  misc_feature (5)..(5): N = G, C, A or T
  misc_feature (7)..(7): N = G, C, A or T
  misc_feature (14)..(14): N = G, C, A or T
  misc_feature (17)..(17): N = G, C, A or T
  misc_feature (24)..(24): N = G, C, A or T
  misc_feature (27)..(27): N = G, C, A or T
  misc_feature (38)..(38): N = G, C, A or T
  misc_feature (76)..(76): N = G, C, A or T
  misc_feature (80)..(80): N = G, C, A or T
  misc_feature (93)..(93): N = G, C, A or T
  misc_feature (96)..(96): N = G, C, A or T
tncangncgctgcncangttcctnggnaaacaggccgncttgggttgtactcaggtactcatgaaacttgtatagngctngtaagaagtttgngtngttcggt

SEQ ID NO: 570 - DNA, 225 bp, Nicotiana tabacum
  misc_feature (6)..(6): N = G, C, A or T
  misc_feature (8)..(8): N = G, C, A or T
  misc_feature (17)..(17): N = G, C, A or T
  misc_feature (22)..(22): N = G, C, A or T
  misc_feature (32)..(32): N = G, C, A or T
  misc_feature (37)..(37): N = G, C, A or T
  misc_feature (49)..(49): N = G, C, A or T
  misc_feature (52)..(52): N = G, C, A or T
  misc_feature (62)..(62): N = G, C, A or T
  misc_feature (64)..(64): N = G, C, A or T
  misc_feature (69)..(69): N = G, C, A or T
  misc_feature (71)..(71): N = G, C, A or T
  misc_feature (75)..(77): N = G, C, A or T
  misc_feature (89)..(90): N = G, C, A or T
  misc_feature (98)..(98): N = G, C, A or T
  misc_feature (101)..(101): N = G, C, A or T
  misc_feature (103)..(103): N = G, C, A or T
  misc_feature (104)..(104): N = G, C, A or T
  misc_feature (107)..(108): N = G, C, A or T
  misc_feature (111)..(111): N = G, C, A or T
  misc_feature (118)..(118): N = G, C, A or T
  misc_feature (132)..(132): N = G, C, A or T
  misc_feature (134)..(134): N = G, C, A or T
  misc_feature (146)..(147): N = G, C, A or T
  misc_feature (171)..(171): N = G, C, A or T
  misc_feature (175)..(175): N = G, C, A or T
  misc_feature (191)..(191): N = G, C, A or T
  misc_feature (215)..(215): N = G, C, A or T
ctggcngnaccaaaggncctgnagcccggtanattcncccctgtagctncanacttcctgantntactntngatnnnacattatggggnnagaccacnatntnnatnntcntcagctngtgacttcatgagntntcttggccatgnnaagctaagacatcaatatgtgagngcgntcacgagcatatgccngagcagacattcatagagactctnttattagtgg

SEQ ID NO: 571 - DNA, 114 bp, Nicotiana tabacum
  misc_feature (10)..(11): N = G, C, A or T
tttctgctgnntcagtgaggttagatcgtaatggagcactttttatggagaacatcaaacaagaagttgaaagtattgatgctgatgtaacaccttctcgaatacaaactgcct

SEQ ID NO: 572 - DNA, 199 bp, Nicotiana tabacum
  misc_feature (9)..(9): N = G, C, A or T
  misc_feature (19)..(19): N = G, C, A or T
  misc_feature (29)..(29): N = G, C, A or T
  misc_feature (41)..(42): N = G, C, A or T
tttgcatgncttcgaaggncagtgcttgntctgaacccgtnncttggacttgacaactagcatcttctctttgcatgctgccctcatgtattgccaatgtaatttctcctctagcaaaccattatgtattacaaactattattatgattgtgaataacttgtgaaaagttcaatcaatctgaaagaaagtaatctctct

SEQ ID NO: 573 - DNA, 91 bp, Nicotiana tabacum
  misc_feature (3)..(3): N = G, C, A or T
ggnttctaatttctaagttgatggctcaaccaaagatatttagtactgaactgattgtactaattgttctataaaattacggggtttagat

SEQ ID NO: 574 - DNA, 182 bp, Nicotiana tabacum
  misc_feature (9)..(9): N = G, C, A or T
  misc_feature (27)..(27): N = G, C, A or T
atatgatgnagtccggaagatcgaatntggggaaggtccttctgggatcaaataggctagatttacttgtttttcctaaaaatgtaataaggccaagtgccagtagtgacttattttattattttagtgtcgttttgggattcgtctatttttatattatgaaatgaagcatttattggcat

SEQ ID NO: 575 - DNA, 68 bp, Nicotiana tabacum
  misc_feature (12)..(12): N = G, C, A or T
  misc_feature (21)..(21): N = G, C, A or T
  misc_feature (43)..(43): N = G, C, A or T
  misc_feature (48)..(48): N = G, C, A or T
  misc_feature (54)..(54): N = G, C, A or T
tttagctacganggttctctncgagattatattctcaacgctnatgcncacgcntttgcttctcgtgt

SEQ ID NO: 576 - DNA, 186 bp, Nicotiana tabacum
  misc_feature (4)..(4): N = G, C, A or T
  misc_feature (8)..(8): N = G, C, A or T
  misc_feature (22)..(22): N = G, C, A or T
  misc_feature (26)..(26): N = G, C, A or T
  misc_feature (46)..(46): N = G, C, A or T
  misc_feature (69)..(69): N = G, C, A or T
  misc_feature (91)..(91): N = G, C, A or T
  misc_feature (92)..(92): N = G, C, A or T
  misc_feature (98)..(98): N = G, C, A or T
  misc_feature (100)..(100): N = G, C, A or T
  misc_feature (104)..(104): N = G, C, A or T
  misc_feature (108)..(110): N = G, C, A or T
  misc_feature (130)..(130): N = G, C, A or T
  misc_feature (136)..(136): N = G, C, A or T
  misc_feature (156)..(156): N = G, C, A or T
cagngctngagctgaacccggngctnggacttgacaactagcatcntctctttgcatgctgccctcatntattgccaatgtaatttctccnntagcanancatnatgnnntacaaactattattatgatngtgaanaactcagtgaaacgttcaancaatctgaaagaaagtaatctctctttcct

SEQ ID NO: 577 - DNA, 216 bp, Nicotiana tabacum
  misc_feature (7)..(7): N = G, C, A or T
  misc_feature (11)..(11): N = G, C, A or T
  misc_feature (13)..(13): N = G, C, A or T
  misc_feature (24)..(24): N = G, C, A or T
  misc_feature (59)..(59): N = G, C, A or T
  misc_feature (66)..(66): N = G, C, A or T
  misc_feature (70)..(70): N = G, C, A or T
gggaggnaaantngccctgaaacntaagaggctgagacttgtcataaagaaacaaactntattcangcangagaagaaagcagtaaggaaaatcagcaaaatagcaatgaggttagcaaagttattgataacaacggagggaccaaggatgtacaacacaagaaggagaacatgaacaaaagagctatgaccactggaaaaattgagcagatcatg

SEQ ID NO: 578 - DNA, 63 bp, Nicotiana tabacum
atacgaaggttcagtgctagtagctgaaccccgttgcttgggaattgatagtttgggtgacag

SEQ ID NO: 579 - DNA, 99 bp, Nicotiana tabacum
  misc_feature (12)..(12): N = G, C, A or T
agaaatctgccnggtttgcatggatataagcaaatgctcaagaatggtgcttgggaacagtgcatgtctgccttggagccctctgtgaagggcaagctg

SEQ ID NO: 580 - DNA, 126 bp, Nicotiana tabacum
  misc_feature (18)..(18): N = G, C, A or T
  misc_feature (25)..(27): N = G, C, A or T
  misc_feature (34)..(34): N = G, C, A or T
  misc_feature (43)..(43): N = G, C, A or T
  misc_feature (60)..(60): N = G, C, A or T
  misc_feature (62)..(62): N = G, C, A or T
  misc_feature (67)..(67): N = G, C, A or T
  misc_feature (86)..(86): N = G, C, A or T
  misc_feature (116)..(117): N = G, C, A or T
  misc_feature (124)..(124): N = G, C, A or T
gctcaaggggaggtggcnccagagnnnagtgcgnggttggggnaaagggtgcagattctncnaaggnccgtcaaaagagcccatgnccaacaatttactaatgattcacaagagcnntgggggngg

SEQ ID NO: 581 - DNA, 142 bp, Nicotiana tabacum
  misc_feature (1)..(1): N = G, C, A or T
  misc_feature (17)..(18): N = G, C, A or T
  misc_feature (20)..(20): N = G, C, A or T
  misc_feature (23)..(23): N = G, C, A or T
  misc_feature (25)..(25): N = G, C, A or T
  misc_feature (28)..(29): N = G, C, A or T
  misc_feature (44)..(44): N = G, C, A or T
  misc_feature (46)..(46): N = G, C, A or T
  misc_feature (50)..(50): N = G, C, A or T
  misc_feature (62)..(62): N = G, C, A or T
  misc_feature (68)..(68): N = G, C, A or T
  misc_feature (74)..(74): N = G, C, A or T
  misc_feature (77)..(77): N = G, C, A or T
  misc_feature (78)..(78): N = G, C, A or T
  misc_feature (80)..(80): N = G, C, A or T
  misc_feature (86)..(86): N = G, C, A or T
  misc_feature (91)..(91): N = G, C, A or T
  misc_feature (93)..(93): N = G, C, A or T
  misc_feature (101)..(101): N = G, C, A or T
  misc_feature (112)..(112): N = G, C, A or T
  misc_feature (127)..(127): N = G, C, A or T
  misc_feature (139)..(139): N = G, C, A or T
natgtgtattcctgaannanctnantgnncaattattcaaccantnattntaccaagttcantgttanccagantanncntcattnatctntntacatgcntcactaagatnttatttgtaacaagnggttttgttggntgg

SEQ ID NO: 582 - DNA, 189 bp, Nicotiana tabacum
gctctaaaaccaacctttatcagtcagaaatcagctttcaaactccataaacacagcagtttggttttcttcaccatcgattctattttccggtcgcggttcgtcacattttttgagttcaaagctatcaaacaattgaattttagacttatttgaggtttatttctccctttccgctattatttttgg

SEQ ID NO: 583 - DNA, 307 bp, Nicotiana tabacum
  misc_feature (28)..(28): N = G, C, A or T
tctatcacaatagagtcctttgctcggngaagagatggggcacatcaagccacattatccactcatcacaatagtagaggccacacacagagaggaaatgcgccaaaaggagctgctgtatatacacatcaaagttataggaagcatgcatcaggaagaggaaatgggcttgttggagctgctctacattctcgtcagaataatatgggcatgggcagaggacaagtgccaaatggtgttcctcaactcaatcatcgcaatgtgggaggtcaatttcgcggacgcgaagcaaagaattcccatttgg

SEQ ID NO: 584 - DNA, 55 bp, Nicotiana tabacum
  misc_feature (1)..(1): N = G, C, A or T
  misc_feature (8)..(8): N = G, C, A or T
  misc_feature (19)..(19): N = G, C, A or T
nggaaggngtttggtgtangggtggggggattggggtggaccccaggtggggggg

SEQ ID NO: 585 - DNA, 68 bp, Nicotiana tabacum
  misc_feature (4)..(4): N = G, C, A or T
  misc_feature (13)..(13): N = G, C, A or T
  misc_feature (18)..(18): N = G, C, A or T
  misc_feature (27)..(29): N = G, C, A or T
  misc_feature (33)..(33): N = G, C, A or T
  misc_feature (56)..(56): N = G, C, A or T
  misc_feature (57)..(57): N = G, C, A or T
  misc_feature (66)..(66): N = G, C, A or T
aaangaggaaaantaatntatggctannnacanatgacaaggacataaggtaactnngcattctancc

SEQ ID NO: 586 - DNA, 121 bp, Nicotiana tabacum
  misc_feature (11)..(11): N = G, C, A or T
  misc_feature (23)..(23): N = G, C, A or T
  misc_feature (31)..(31): N = G, C, A or T
  misc_feature (33)..(33): N = G, C, A or T
  misc_feature (44)..(45): N = G, C, A or T
  misc_feature (72)..(72): N = G, C, A or T
  misc_feature (87)..(87): N = G, C, A or T
tttggctgccntttgctaatccnttgcagtntntgtgcataatnngagtaggggtatgaagatgcccacctnttgttcattcacttnaaggataattacaagccaactatggaatgtgacg

SEQ ID NO: 587 - DNA, 132 bp, Nicotiana tabacum
  misc_feature (4)..(4): N = G, C, A or T
agantagaatgttgtaagagtattgaactcaaagcagtattgtaagtttgtaagtaagttgaaagtattgaactaaaggctcgaggtattcaactcgaagtagtggtgtaaaagtattgaattggaagtgcg

SEQ ID NO: 588 - DNA, 124 bp, Nicotiana tabacum
cccctcatttcacacattcttgaaaccaggtgcacttgcccaaatcaggtactccaaaatctctgctaaatcaaggttgaaaactgttcagtccctgtttgctatttatagtcaacaaattccc

SEQ ID NO: 589 - DNA, 153 bp, Nicotiana tabacum
  misc_feature (9)..(9): N = G, C, A or T
  misc_feature (33)..(33): N = G, C, A or T
  misc_feature (37)..(38): N = G, C, A or T
  misc_feature (42)..(42): N = G, C, A or T
  misc_feature (44)..(44): N = G, C, A or T
  misc_feature (46)..(46): N = G, C, A or T
  misc_feature (49)..(49): N = G, C, A or T
  misc_feature (60)..(60): N = G, C, A or T
  misc_feature (74)..(74): N = G, C, A or T
  misc_feature (78)..(78): N = G, C, A or T
  misc_feature (88)..(88): N = G, C, A or T
  misc_feature (96)..(96): N = G, C, A or T
  misc_feature (101)..(102): N = G, C, A or T
  misc_feature (105)..(105): N = G, C, A or T
  misc_feature (113)..(113): N = G, C, A or T
  misc_feature (126)..(126): N = G, C, A or T
tttgggaancttttggaaggtcccatatacgtntttnncaantnanccnggggccttctnggttttttttatgntttnatacgtcggnttgagaanattgnntgnttacaagnaggtgaggaatanataatatgattccttatcttctttgcg

SEQ ID NO: 590 - DNA, 147 bp, Nicotiana tabacum
  misc_feature (51)..(51): N = G, C, A or T
cagcggaatgccaccgaggcgataccagcgatgctgcacgtgatggcatgntctgcttcggcgcgacctggggcagaatagaggaatccggtatagcgcttctcgcccaaccggtactgtgcgaggaagctaatcttattcatgccg

SEQ ID NO: 591 - DNA, 194 bp, Nicotiana tabacum
  misc_feature (5)..(5): N = G, C, A or T
  misc_feature (17)..(17): N = G, C, A or T
  misc_feature (19)..(20): N = G, C, A or T
  misc_feature (25)..(25): N = G, C, A or T
  misc_feature (28)..(29): N = G, C, A or T
  misc_feature (32)..(32): N = G, C, A or T
  misc_feature (36)..(36): N = G, C, A or T
  misc_feature (45)..(45): N = G, C, A or T
  misc_feature (47)..(47): N = G, C, A or T
  misc_feature (48)..(48): N = G, C, A or T
  misc_feature (51)..(51): N = G, C, A or T
  misc_feature (55)..(55): N = G, C, A or T
  misc_feature (58)..(58): N = G, C, A or T
  misc_feature (61)..(61): N = G, C, A or T
  misc_feature (63)..(64): N = G, C, A or T
  misc_feature (71)..(71): N = G, C, A or T
  misc_feature (78)..(78): N = G, C, A or T
  misc_feature (81)..(81): N = G, C, A or T
  misc_feature (85)..(85): N = G, C, A or T
  misc_feature (97)..(97): N = G, C, A or T
  misc_feature (121)..(121): N = G, C, A or T
  misc_feature (134)..(134): N = G, C, A or T
  misc_feature (137)..(137): N = G, C, A or T
  misc_feature (144)..(144): N = G, C, A or T
  misc_feature (152)..(152): N = G, C, A or T
  misc_feature (178)..(178): N = G, C, A or T
  misc_feature (187)..(187): N = G, C, A or T
ggccngtagttgggctngnnacgcnccnnagnaccnactggcccngnnaangagnatnagntnntcatgcnttatacnggnactnacaacccaccanccatgccatagcaaagaagcgagntataaacacaagntcnggacctntgcctatnccaatcaaaatttacaaagccacggntacaaactnctaaacg

SEQ ID NO: 592 - DNA, 81 bp, Nicotiana tabacum
  misc_feature (4)..(6): N = G, C, A or T
  misc_feature (13)..(13): N = G, C, A or T
  misc_feature (15)..(15): N = G, C, A or T
  misc_feature (16)..(16): N = G, C, A or T
  misc_feature (21)..(21): N = G, C, A or T
tttnnncctttcntnncatgntatacgaaggtcagtgctagagctgaacccgttgcttggaattgatagtttgggtgacag

SEQ ID NO: 593 - DNA, 85 bp, Nicotiana tabacum
  misc_feature (15)..(15): N = G, C, A or T
  misc_feature (19)..(19): N = G, C, A or T
  misc_feature (20)..(20): N = G, C, A or T
  misc_feature (22)..(22): N = G, C, A or T
  misc_feature (24)..(24): N = G, C, A or T
  misc_feature (31)..(31): N = G, C, A or T
  misc_feature (39)..(39): N = G, C, A or T
  misc_feature (43)..(43): N = G, C, A or T
  misc_feature (46)..(46): N = G, C, A or T
  misc_feature (54)..(54): N = G, C, A or T
  misc_feature (60)..(60): N = G, C, A or T
ccagactcgcgatanctgnntnanctaacantagcattntgangangtacctgngacttncacatagcagcggtgggtcgaacag

SEQ ID NO: 594 - DNA, 207 bp, Nicotiana tabacum
  misc_feature (23)..(23): N = G, C, A or T
  misc_feature (91)..(91): N = G, C, A or T
  misc_feature (104)..(104): N = G, C, A or T
  misc_feature (154)..(154): N = G, C, A or T
  misc_feature (175)..(175): N = G, C, A or T
atctattggatttatgctttggnttctgcttctaaaatatagaaattctggagaattgaagctcgtttctattcgaggttgcaattccagntcgaaatcatggnccatagctcgctcgaggattgctttttctttggagattattttgcactgnacccgttgaaaaattttcagnaacaaaggtccatcttccccattgcaacttca

SEQ ID NO: 595 - DNA, 274 bp, Nicotiana tabacum
  misc_feature (4)..(4): N = G, C, A or T
  misc_feature (17)..(17): N = G, C, A or T
  misc_feature (21)..(21): N = G, C, A or T
  misc_feature (37)..(37): N = G, C, A or T
  misc_feature (59)..(59): N = G, C, A or T
  misc_feature (90)..(90): N = G, C, A or T
  misc_feature (165)..(165): N = G, C, A or T
  misc_feature (188)..(188): N = G, C, A or T
  misc_feature (189)..(189): N = G, C, A or T
  misc_feature (207)..(207): N = G, C, A or T
  misc_feature (252)..(252): N = G, C, A or T
  misc_feature (255)..(255): N = G, C, A or T
agancctatgataacangatnggaggactcatggctnaggcttggctggaaacatcggngctggggcccaccactctgaaccatatcgtntaggacggtctcctactagctggcctccacctctagcggtctggcctccacatataacgacctgacctatacctntagcgggatgacccctacctcgnnctcccagacccctacctntaaatggcttggcaggcaatgccagaatcatggcacggtgaactntgntactgcgactgaacaccca

SEQ ID NO: 596 - DNA, 89 bp, Nicotiana tabacum
  misc_feature (3)..(3): N = G, C, A or T
  misc_feature (28)..(28): N = G, C, A or T
  misc_feature (33)..(33): N = G, C, A or T
  misc_feature (37)..(37): N = G, C, A or T
  misc_feature (43)..(43): N = G, C, A or T
  misc_feature (52)..(52): N = G, C, A or T
  misc_feature (74)..(74): N = G, C, A or T
  misc_feature (76)..(77): N = G, C, A or T
  misc_feature (80)..(80): N = G, C, A or T
tcncagcatcgcaagtgatttactttgnctggngccnccaagntggaaggangttagccctgtaatcaaggcgntnntgnccttgcctc

SEQ ID NO: 597 - DNA, 126 bp, Nicotiana tabacum
  misc_feature (2)..(2): N = G, C, A or T
  misc_feature (5)..(5): N = G, C, A or T
  misc_feature (11)..(11): N = G, C, A or T
  misc_feature (17)..(17): N = G, C, A or T
  misc_feature (24)..(24): N = G, C, A or T
  misc_feature (64)..(64): N = G, C, A or T
  misc_feature (65)..(65): N = G, C, A or T
  misc_feature (71)..(71): N = G, C, A or T
  misc_feature (122)..(122): N = G, C, A or T
cncancaaccnttgtanatatgcnctttttacgctcgaaattttttagctgattgaagagggtnntctccntcttggcaggtataaggggaaagaagctgcttattgtagcagcaagttagngatc

SEQ ID NO: 598 - DNA, 145 bp, Nicotiana tabacum
  misc_feature (29)..(29): N = G, C, A or T
gagaccgttggccgcataaacagctccanctgaaaaggggagtaattgttttttttcttcttcttctgaaatatatatagacaaaagaaagaaaaataggaatgagaaaagggggaaaagcatgtgttcctagctattagtttcc

SEQ ID NO: 599 - DNA, 84 bp, Nicotiana tabacum
cttgccggtccatttgcaggttgaagtggcagcttctggatcatgaaacgattgagtgcagcgtctgccagcatccattccttg

SEQ ID NO: 600 - DNA, 126 bp, Nicotiana tabacum
  misc_feature (2)..(2): N = G, C, A or T
  misc_feature (11)..(11): N = G, C, A or T
  misc_feature (19)..(19): N = G, C, A or T
  misc_feature (24)..(24): N = G, C, A or T
  misc_feature (34)..(34): N = G, C, A or T
  misc_feature (40)..(40): N = G, C, A or T
  misc_feature (52)..(52): N = G, C, A or T
  misc_feature (55)..(55): N = G, C, A or T
  misc_feature (58)..(58): N = G, C, A or T
  misc_feature (61)..(61): N = G, C, A or T
  misc_feature (87)..(87): N = G, C, A or T
  misc_feature (97)..(97): N = G, C, A or T
  misc_feature (98)..(98): N = G, C, A or T
  misc_feature (102)..(102): N = G, C, A or T
  misc_feature (108)..(108): N = G, C, A or T
  misc_feature (120)..(120): N = G, C, A or T
cnccacgtctntgtgccgnagccnccccctcgcnccaatncgggtgtcattncancgncancgatttttacctacaagataggtggntcggatcganncgcnacattngatcagatttgncggtgc

SEQ ID NO: 601 - DNA, 137 bp, Nicotiana tabacum
  misc_feature (2)..(2): N = G, C, A or T
  misc_feature (4)..(4): N = G, C, A or T
  misc_feature (6)..(6): N = G, C, A or T
  misc_feature (10)..(11): N = G, C, A or T
  misc_feature (18)..(18): N = G, C, A or T
  misc_feature (23)..(23): N = G, C, A or T
  misc_feature (31)..(31): N = G, C, A or T
  misc_feature (59)..(59): N = G, C, A or T
  misc_feature (64)..(64): N = G, C, A or T
  misc_feature (65)..(66): N = G, C, A or T
  misc_feature (68)..(68): N = G, C, A or T
  misc_feature (73)..(73): N = G, C, A or T
  misc_feature (97)..(97): N = G, C, A or T
  misc_feature (100)..(100): N = G, C, A or T
tncngncccnnttttgcncaaanccttgaanctccaaccactaccaccccaaaataccnacatnnntngattnagctcttcaagacctagctattgntgncaattctaccccaaaaatccggcgaccaaaatctggc

SEQ ID NO: 602 - DNA, 29 bp, Nicotiana tabacum
  misc_feature (3)..(5): N = G, C, A or T
  misc_feature (26)..(26): N = G, C, A or T
tcnnnaacacaccctaaccttcaacnccc

SEQ ID NO: 603 - DNA, 129 bp, Nicotiana tabacum
  misc_feature (1)..(1): N = G, C, A or T
  misc_feature (66)..(66): N = G, C, A or T
ncaacagctctaactgaaaaggggagtaattgttttttttcttcttcttctgaaatatatataganaaaagaaagaaaaataggaatgagaaaagggggaaaagcatgtgttcctagctattagtttcc

SEQ ID NO: 604 - DNA, 253 bp, Nicotiana tabacum
  misc_feature (1)..(1): N = G, C, A or T
  misc_feature (16)..(16): N = G, C, A or T
  misc_feature (74)..(74): N = G, C, A or T
  misc_feature (234)..(234): N = G, C, A or T
nagcccggagcttttnaattctttcataacccaaggagaagaataggactctttaccagtatcataacctctcnatgggaaatggaacttagatcacgatgtgaacctacttatgagtggaatttcgttgacaagcaaattccccgggaaaacaaacttttctccaattgagatgctctcttcatttatggattctatgcgagattcggttagtgcgaagtgtgatcctggctnagaaggaaaagctatatgc

SEQ ID NO: 605 - DNA, 23 bp, Nicotiana tabacum
  misc_feature (3)..(3): N = G, C, A or T
  misc_feature (14)..(14): N = G, C, A or T
  misc_feature (16)..(16): N = G, C, A or T
ggnccaaaatcggnancatctcc

SEQ ID NO: 606 - DNA, 112 bp, Nicotiana tabacum
  misc_feature (2)..(2): N = G, C, A or T
  misc_feature (23)..(23): N = G, C, A or T
  misc_feature (44)..(44): N = G, C, A or T
  misc_feature (49)..(49): N = G, C, A or T
  misc_feature (84)..(84): N = G, C, A or T
tncccagcattccgcgctaccanagaaaaagatggatccaccanagatnaaacaagttatattgggtataggcatatgacgaanaccagagagacaagggcagttctatgat

SEQ ID NO: 607 - DNA, 209 bp, Nicotiana tabacum
  misc_feature (11)..(11): N = G, C, A or T
  misc_feature (18)..(18): N = G, C, A or T
  misc_feature (22)..(22): N = G, C, A or T
  misc_feature (30)..(30): N = G, C, A or T
  misc_feature (38)..(38): N = G, C, A or T
  misc_feature (45)..(45): N = G, C, A or T
  misc_feature (64)..(65): N = G, C, A or T
  misc_feature (87)..(87): N = G, C, A or T
  misc_feature (93)..(93): N = G, C, A or T
  misc_feature (97)..(97): N = G, C, A or T
  misc_feature (107)..(107): N = G, C, A or T
  misc_feature (130)..(130): N = G, C, A or T
  misc_feature (137)..(137): N = G, C, A or T
  misc_feature (149)..(149): N = G, C, A or T
  misc_feature (154)..(154): N = G, C, A or T
  misc_feature (156)..(156): N = G, C, A or T
  misc_feature (159)..(159): N = G, C, A or T
  misc_feature (162)..(162): N = G, C, A or T
  misc_feature (206)..(206): N = G, C, A or T
  misc_feature (207)..(207): N = G, C, A or T
gacccttcccncaccgtntcgnatcttcgnttgaagantcgagcnggaccccaacctatgtcanncccccccaaatccataccaggnatccanctgncctcccttgngaccaaaccaagcttggctttgnccgaatntaaccagaaaancccangnccnaantcaggtccaagaaccctagaaatccggaatctgagggttttgtnnga

SEQ ID NO: 608 - DNA, 195 bp, Nicotiana tabacum
  misc_feature (24)..(24): N = G, C, A or T
tgctgttttcaggtctgctgattntgtgacgacgttagaaatctagtctcaatcccactgtatgtagtgtagagtaaacagttttgttgggcagctcaagagctgctgcaggtatttgatgttagttccacgggctctccaaaatcttgaaggccagatttgaagaaatatcctaaaaatatgtcttcttattcg

SEQ ID NO: 609 - DNA, 87 bp, Nicotiana tabacum
  misc_feature (2)..(2): N = G, C, A or T
  misc_feature (5)..(5): N = G, C, A or T
  misc_feature (10)..(11): N = G, C, A or T
  misc_feature (19)..(20): N = G, C, A or T
  misc_feature (22)..(22): N = G, C, A or T
  misc_feature (46)..(46): N = G, C, A or T
  misc_feature (51)..(51): N = G, C, A or T
  misc_feature (73)..(73): N = G, C, A or T
  misc_feature (80)..(80): N = G, C, A or T
  misc_feature (83)..(83): N = G, C, A or T
gnagnggcgnncagcatcnntngatctgaaagggaacatgattgtntggtnaaactcgtaacggtaattaatnaccttgntangtcc

SEQ ID NO: 610 - DNA, 95 bp, Nicotiana tabacum
  misc_feature (27)..(27): N = G, C, A or T
  misc_feature (60)..(60): N = G, C, A or T
  misc_feature (95)..(95): N = G, C, A or T
ggggtcgggtttccggcgagtcaaggngtaatcttgttgttctgacaacgagtcgatgtngaaagtcacgtaactcaataccaaaggaaagggcn

SEQ ID NO: 611 - DNA, 174 bp, Nicotiana tabacum
  misc_feature (45)..(45): N = G, C, A or T
  misc_feature (95)..(95): N = G, C, A or T
ccccggacgtttgaatctgggccaggtccttctggtaccaaatanggctagatttatttactttttcctaaaatgtaataaggccaaatgccagnactgacttattttttatcatcttagtgtcgtttggggattcgtctatttttatattatgaaatgaagcatttattggca

SEQ ID NO: 612 - DNA, 280 bp, Nicotiana tabacum
  misc_feature (5)..(5): N = G, C, A or T
  misc_feature (12)..(12): N = G, C, A or T
  misc_feature (41)..(41): N = G, C, A or T
  misc_feature (53)..(53): N = G, C, A or T
  misc_feature (67)..(67): N = G, C, A or T
  misc_feature (68)..(68): N = G, C, A or T
  misc_feature (70)..(70): N = G, C, A or T
  misc_feature (93)..(93): N = G, C, A or T
  misc_feature (100)..(100): N = G, C, A or T
  misc_feature (113)..(113): N = G, C, A or T
  misc_feature (140)..(140): N = G, C, A or T
ccccncagcttngaacataaccccccgagcatgactgcttntgatttacttancttatgcagttttnnanacgttcccacaagaacacgttcntcgttgncaaacagagattngaaggtttgtcatgattctgttactgnagatgagaatgctcatgagggcgggctccctaaggaaactgaagtgcattcccaagacatctctgtggatgcgaaaagcctcaattctgagaaattgaaagcgccatccatggaggaagaatcatgtcttacttatgcca

SEQ ID NO: 613 - DNA, 417 bp, Nicotiana tabacum
  misc_feature (1)..(1): N = G, C, A or T
  misc_feature (8)..(8): N = G, C, A or T
  misc_feature (14)..(14): N = G, C, A or T
  misc_feature (22)..(23): N = G, C, A or T
  misc_feature (29)..(29): N = G, C, A or T
  misc_feature (43)..(44): N = G, C, A or T
  misc_feature (55)..(55): N = G, C, A or T
  misc_feature (57)..(57): N = G, C, A or T
  misc_feature (61)..(61): N = G, C, A or T
  misc_feature (63)..(63): N = G, C, A or T
  misc_feature (68)..(68): N = G, C, A or T
  misc_feature (70)..(70): N = G, C, A or T
  misc_feature (79)..(79): N = G, C, A or T
  misc_feature (83)..(83): N = G, C, A or T
  misc_feature (87)..(87): N = G, C, A or T
  misc_feature (88)..(88): N = G, C, A or T
  misc_feature (96)..(96): N = G, C, A or T
  misc_feature (108)..(108): N = G, C, A or T
  misc_feature (115)..(115): N = G, C, A or T
  misc_feature (136)..(136): N = G, C, A or T
  misc_feature (138)..(138): N = G, C, A or T
  misc_feature (143)..(143): N = G, C, A or T
  misc_feature (145)..(145): N = G, C, A or T
  misc_feature (175)..(175): N = G, C, A or T
  misc_feature (233)..(233): N = G, C, A or T
  misc_feature (245)..(245): N = G, C, A or T
  misc_feature (248)..(248): N = G, C, A or T
  misc_feature (255)..(255): N = G, C, A or T
  misc_feature (267)..(267): N = G, C, A or T
  misc_feature (269)..(269): N = G, C, A or T
  misc_feature (291)..(291): N = G, C, A or T
  misc_feature (309)..(309): N = G, C, A or T
ngcctacnggcacntcggcttnntacttntgtggatggctccnngctagccagtntnaganantaacngntgcatccgngacntatnnatgaattnccattgttgtcngatggtnggtcagggcataacctgttangntgganancatgatgtgctgtggatacacaaagaatgnaggcagacattcacagagtgctttctccaatagcacaagaaaaggaaccatcggtttntacacccagagnggnaaccccnattgtttccaancnaagcagtaaattcatgggaagnccttcttcacaagcaggntcatggaggcccaagcatccaacagttgttgcaataaagaagcaaattgtgtggagtcctctgaagatgaaggccatgagaagtaggcaataggaagcccctctcttc

SEQ ID NO: 614 - DNA, 91 bp, Nicotiana tabacum
  misc_feature (25)..(25): N = G, C, A or T
  misc_feature (31)..(31): N = G, C, A or T
  misc_feature (44)..(44): N = G, C, A or T
  misc_feature (45)..(45): N = G, C, A or T
  misc_feature (47)..(47): N = G, C, A or T
  misc_feature (48)..(48): N = G, C, A or T
  misc_feature (52)..(52): N = G, C, A or T
  misc_feature (56)..(56): N = G, C, A or T
  misc_feature (67)..(67): N = G, C, A or T
  misc_feature (68)..(68): N = G, C, A or T
  misc_feature (71)..(71): N = G, C, A or T
  misc_feature (78)..(78): N = G, C, A or T
  misc_feature (80)..(80): N = G, C, A or T
  misc_feature (90)..(90): N = G, C, A or T
acaacggctaggttccgcgagtcancctggnaaaggagcctggnnanngtanagangaccgacagtnncgnatacagncncgagaacgtna

SEQ ID NO: 615 - DNA, 106 bp, Nicotiana tabacum
  misc_feature (52)..(52): N = G, C, A or T
ccaataggctcaaaacgcaacaaaaaccaaaagaagaacgaaattcccttgnttggattcataatctcaattgtcttgttttgtctggtacgtgaaaatgttgata

SEQ ID NO: 616 - DNA, 169 bp, Nicotiana tabacum
  misc_feature (15)..(15): N = G, C, A or T
  misc_feature (22)..(22): N = G, C, A or T
  misc_feature (34)..(34): N = G, C, A or T
  misc_feature (42)..(42): N = G, C, A or T
  misc_feature (66)..(66): N = G, C, A or T
  misc_feature (67)..(67): N = G, C, A or T
  misc_feature (72)..(72): N = G, C, A or T
  misc_feature (78)..(78): N = G, C, A or T
  misc_feature (80)..(80): N = G, C, A or T
  misc_feature (100)..(100): N = G, C, A or T
  misc_feature (108)..(108): N = G, C, A or T
  misc_feature (115)..(115): N = G, C, A or T
ggaagtagctgcctncttgtgntgaaggcttgcngctgtctnccttcatttgttagcctagtaaanntggcntatatntncgatggccgctctcatgtgntaagcacntttgctnaaccatttctatgatagcatgagaatgatgatgctatgagttacaatgctggga

SEQ ID NO: 617 - DNA, 179 bp, Nicotiana tabacum
  misc_feature (1)..(1): N = G, C, A or T
  misc_feature (14)..(14): N = G, C, A or T
nggaggggtccggnagatgaatctgggaaaggtccttctggtaccaaataggctagatttatttactttttcctaaaatgtaataaggccaaatgccagtactgacttattttttatcatcttagtgtcgtttggggattcgtctatttttatattatgaaatgaagcatttattggca

SEQ ID NO: 618 - DNA, 51 bp, Nicotiana tabacum
caaggttttggtctttcttttttggagattggttgtgctatcttagctcca

SEQ ID NO: 619 - DNA, 94 bp, Nicotiana tabacum
  misc_feature (8)..(8): N = G, C, A or T
  misc_feature (25)..(25): N = G, C, A or T
  misc_feature (33)..(33): N = G, C, A or T
  misc_feature (39)..(39): N = G, C, A or T
  misc_feature (47)..(47): N = G, C, A or T
  misc_feature (52)..(52): N = G, C, A or T
  misc_feature (57)..(57): N = G, C, A or T
  misc_feature (58)..(58): N = G, C, A or T
  misc_feature (63)..(63): N = G, C, A or T
  misc_feature (79)..(79): N = G, C, A or T
  misc_feature (82)..(82): N = G, C, A or T
tacccacnccacctcccgctgctgntcctttgncttcanctcattcnaagcntgacnncactnccaatgtgtaaagctnagnggcgtactcgct

SEQ ID NO: 620 - DNA, 226 bp, Nicotiana tabacum
  misc_feature (2)..(2): N = G, C, A or T
  misc_feature (44)..(44): N = G, C, A or T
  misc_feature (99)..(99): N = G, C, A or T
  misc_feature (215)..(215): N = G, C, A or T
tngttgcttcttctccacgccttctccggcactacttcttcttntccggtcgaaaattcggcagatccctctcattttctggctgggccgttcatcttnctcagcacaccacaaacaatcgatcttctcgacctctcaaccataaagccaccatcgaatccctctcatccgtttactcgaacatactagttacagaactaaataaactttcaaantttttgctgtt

SEQ ID NO: 621 - DNA, 478 bp, Nicotiana tabacum
  misc_feature (20)..(20): N = G, C, A or T
  misc_feature (30)..(30): N = G, C, A or T
  misc_feature (42)..(42): N = G, C, A or T
  misc_feature (45)..(46): N = G, C, A or T
  misc_feature (61)..(63): N = G, C, A or T
  misc_feature (68)..(69): N = G, C, A or T
  misc_feature (71)..(71): N = G, C, A or T
  misc_feature (83)..(83): N = G, C, A or T
  misc_feature (91)..(92): N = G, C, A or T
  misc_feature (99)..(99): N = G, C, A or T
  misc_feature (127)..(127): N = G, C, A or T
  misc_feature (133)..(133): N = G, C, A or T
  misc_feature (136)..(136): N = G, C, A or T
  misc_feature (330)..(330): N = G, C, A or T
  misc_feature (337)..(337): N = G, C, A or T
  misc_feature (352)..(352): N = G, C, A or T
  misc_feature (354)..(354): N = G, C, A or T
  misc_feature (361)..(362): N = G, C, A or T
  misc_feature (370)..(370): N = G, C, A or T
  misc_feature (372)..(373): N = G, C, A or T
  misc_feature (381)..(381): N = G, C, A or T
  misc_feature (384)..(384): N = G, C, A or T
  misc_feature (401)..(401): N = G, C, A or T
  misc_feature (406)..(406): N = G, C, A or T
  misc_feature (423)..(423): N = G, C, A or T
  misc_feature (429)..(429): N = G, C, A or T
  misc_feature (447)..(447): N = G, C, A or T
  misc_feature (453)..(453): N = G, C, A or T
  misc_feature (457)..(457): N = G, C, A or T
  misc_feature (465)..(465): N = G, C, A or T
  misc_feature (473)..(473): N = G, C, A or T
gcactacaagaagctgctgnggcttcttgnagggttttgtgngannataccactcttgatnnntgttnncnccgatggttatnggtttcannggaagcntcttcaagtcttacaaatcttatgaggnagcaanagnagtattcaatgacttccaaaaagaaaatatttacagtgaagaacaatcttcaagtttgtgtattgatgaaagtgatattggagcaagtgttatgtcatctgtattgttagctggaatgtttgtagggatgaagatttcaaaaagttcttcagtttgattgttgataagagtattttgctcaattttttattatngcttagnttgggtattattagntngattgtnnagtttgangnnatactggntgncgcattcaacctctgtngaatngagtatttaggatgccnaagccnttatctttttgactcccngttggnatgnaataaaanatgtctgntgatt

SEQ ID NO: 622 - DNA, 149 bp, Nicotiana tabacum
  misc_feature (2)..(2): N = G, C, A or T
  misc_feature (7)..(8): N = G, C, A or T
  misc_feature (16)..(16): N = G, C, A or T
  misc_feature (33)..(33): N = G, C, A or T
  misc_feature (52)..(52): N = G, C, A or T
  misc_feature (55)..(55): N = G, C, A or T
  misc_feature (70)..(70): N = G, C, A or T
  misc_feature (81)..(81): N = G, C, A or T
  misc_feature (100)..(100): N = G, C, A or T
  misc_feature (105)..(106): N = G, C, A or T
  misc_feature (132)..(132): N = G, C, A or T
  misc_feature (143)..(143): N = G, C, A or T
antacanntaaaggtnttagctgctgacatttngaattgtcgctcaagctgntgnttggattgcttgtcnctgaaatttgnatttttgagtgttcgagtncgatnncaatttcagaaagtgaagctacattntgttgaatctnctattg

SEQ ID NO: 623 - DNA, 116 bp, Nicotiana tabacum
ctaggcgtgttagtcgacaaagcatagcccacgttctgtgtttttggatcgcagttcatcgtcaaattctaggcgtagttctagtggtactagttcgaagcatccgtacagtagct

SEQ ID NO: 624 - DNA, 119 bp, Nicotiana tabacum
agaaccaatccccaaatttttggggtacccactccacctcccgctgctgctcctttgccttcaactcatttcaagcatgacaacacttccaatgtgtaaagcttcgaggcatactcgct

SEQ ID NO: 625 - DNA, 95 bp, Nicotiana tabacum
  misc_feature (9)..(9): N = G, C, A or T
  misc_feature (15)..(15): N = G, C, A or T
  misc_feature (18)..(18): N = G, C, A or T
  misc_feature (21)..(21): N = G, C, A or T
  misc_feature (24)..(24): N = G, C, A or T
  misc_feature (37)..(37): N = G, C, A or T
  misc_feature (41)..(41): N = G, C, A or T
  misc_feature (70)..(70): N = G, C, A or T
  misc_feature (84)..(84): N = G, C, A or T
caattagcntgtgcnagncanaanagggaagagaagnaatntttgtatagcttcttgacaaatgtaggtnttagtgatccttgntatttacttat

SEQ ID NO: 626 - DNA, 129 bp, Nicotiana tabacum
ttgtaatgctttgttatccaccactggtgtcgaacaatgttcagtgttttcttctaatggttagttcaagttgttgtggataaatgattatactgtgctcttcgtaaacataggatgcatttgtaccat

SEQ ID NO: 627 - DNA, 81 bp, Nicotiana tabacum
  misc_feature (4)..(4): N = G, C, A or T
  misc_feature (42)..(43): N = G, C, A or T
  misc_feature (45)..(45): N = G, C, A or T
  misc_feature (58)..(58): N = G, C, A or T
  misc_feature (66)..(66): N = G, C, A or T
  misc_feature (74)..(74): N = G, C, A or T
  misc_feature (78)..(79): N = G, C, A or T
tggntgatatcattatagatatagggcttcactccctaatcnntntttttccaaggtntacacaancctgattnttcnnct

SEQ ID NO: 628 - DNA, 239 bp, Nicotiana tabacum
aggttgatgaagaaaatgaaagactaatagttgatgaagtatgtgaagcaatgaacaagatcaatgtttacaaccgatcatgagtttgaaggagtagaagaagagtgtgctgaatttgcatttgcctaaaggaaaccacttgcgtttccccgaagataactgaatgaaaaactttgttttttttccgctttctgtgaagacaccaatagctgaggtgttttagaaagtattacattctg

SEQ ID NO: 629 - DNA, 78 bp, Nicotiana tabacum
  misc_feature (1)..(1): N = G, C, A or T
  misc_feature (5)..(5): N = G, C, A or T
  misc_feature (7)..(7): N = G, C, A or T
  misc_feature (13)..(14): N = G, C, A or T
  misc_feature (29)..(29): N = G, C, A or T
  misc_feature (45)..(45): N = G, C, A or T
  misc_feature (46)..(47): N = G, C, A or T
  misc_feature (50)..(51): N = G, C, A or T
  misc_feature (59)..(61): N = G, C, A or T
  misc_feature (72)..(72): N = G, C, A or T
  misc_feature (74)..(74): N = G, C, A or T
  misc_feature (76)..(76): N = G, C, A or T
nttcnancgaacnntccatgtgctcattncatgcaatgctgatgnnnaanngtgtccannnggccgtttacncntngg

SEQ ID NO: 630 - DNA, 192 bp, Nicotiana tabacum
  misc_feature (6)..(6): N = G, C, A or T
  misc_feature (15)..(15): N = G, C, A or T
  misc_feature (36)..(36): N = G, C, A or T
  misc_feature (58)..(58): N = G, C, A or T
  misc_feature (64)..(64): N = G, C, A or T
  misc_feature (68)..(68): N = G, C, A or T
  misc_feature (79)..(79): N = G, C, A or T
  misc_feature (93)..(93): N = G, C, A or T
  misc_feature (103)..(103): N = G, C, A or T
  misc_feature (107)..(107): N = G, C, A or T
  misc_feature (115)..(115): N = G, C, A or T
  misc_feature (138)..(138): N = G, C, A or T
  misc_feature (178)..(178): N = G, C, A or T
  misc_feature (186)..(186): N = G, C, A or T
tgaccnaggaccaanattgaaggaacatcaacaaangacttgttactatgaatctttngcttgncgantagagcttatntattcttatgatgntgatgatgangctntaggcatnaaacttcatactaatatctttgnaattgcatctggatgttcaacttctaagagttgtgatggnctttagantttgag

SEQ ID NO: 631 - DNA, 316 bp, Nicotiana tabacum
  misc_feature (12)..(12): N = G, C, A or T
  misc_feature (20)..(21): N = G, C, A or T
  misc_feature (75)..(75): N = G, C, A or T
tttcttcaagantgccaaannaagcatgcaatgagcaacggttgtcacacgacatatagcactgtcaagttactnacaaaaagtgagaaaaagaaaaatgagagagtcttactagtgaaaacctccacgggcactgtaaggcgacggtaagcagagatgaataaatgagagagacttgttggtgaaaaccccttgggaactacttgtcgaaagtgagtcgtgaagctgatgcgaagaattggcataaacaagcctgacttcaaaggtcataagaatggtataaggggaagattggattagtttggtagatcggtcg

SEQ ID NO: 632 - DNA, 55 bp, Nicotiana tabacum
  misc_feature (10)..(10): N = G, C, A or T
  misc_feature (22)..(22): N = G, C, A or T
  misc_feature (24)..(24): N = G, C, A or T
  misc_feature (30)..(30): N = G, C, A or T
  misc_feature (48)..(48): N = G, C, A or T
  misc_feature (51)..(51): N = G, C, A or T
gtgcaggagntggcccaaaagnangggagntgaatttactaattctgntgntggc

SEQ ID NO: 633 - DNA, 93 bp, Nicotiana tabacum
  misc_feature (5)..(5): N = G, C, A or T
  misc_feature (25)..(25): N = G, C, A or T
  misc_feature (30)..(30): N = G, C, A or T
  misc_feature (45)..(45): N = G, C, A or T
  misc_feature (59)..(59): N = G, C, A or T
  misc_feature (65)..(65): N = G, C, A or T
  misc_feature (73)..(73): N = G, C, A or T
  misc_feature (80)..(80): N = G, C, A or T
  misc_feature (92)..(92): N = G, C, A or T
ccacnccccctattttcccctatangcccnttctacattggcacntttcacaaacaagnacgctnaccctttnttatgtnggactctgtacnc

SEQ ID NO: 634 - DNA, 198 bp, Nicotiana tabacum
  misc_feature (6)..(6): N = G, C, A or T
  misc_feature (9)..(9): N = G, C, A or T
  misc_feature (17)..(17): N = G, C, A or T
  misc_feature (26)..(26): N = G, C, A or T
  misc_feature (38)..(38): N = G, C, A or T
  misc_feature (64)..(64): N = G, C, A or T
  misc_feature (125)..(125): N = G, C, A or T
  misc_feature (196)..(196): N = G, C, A or T
gaggcnttncatttgancttcattgnaccaacaacttnaccaccatggcacactagttccttgncgacgggaagcaccatgaaaaacgctgtccctcaccactaaaagctcaccggaaaatagtngccggataagcttcagcacacccaggacccttctcgcatctccttcacaccagcgacccctcccccccggncg

SEQ ID NO: 635 - DNA, 338 bp, Nicotiana tabacum
  misc_feature (1)..(3): N = G, C, A or T
  misc_feature (7)..(7): N = G, C, A or T
  misc_feature (16)..(16): N = G, C, A or T
  misc_feature (19)..(20): N = G, C, A or T
  misc_feature (43)..(43): N = G, C, A or T
  misc_feature (52)..(52): N = G, C, A or T
  misc_feature (56)..(56): N = G, C, A or T
  misc_feature (82)..(82): N = G, C, A or T
  misc_feature (118)..(118): N = G, C, A or T
nnnacgntctcgagtntgnngcctttctcaagactgcccaaanaagcatgcnatgngcaacggttgtcacacgacatatagnactgtcaagttacttacaaaaagtgagaaaaggaanaatgagagagtcttactagtgaaaacctccacgggcactgtaaggcgacggtaagcagagatgaataaatgagagagacttgttggtgaaaaccccttgggaactacttgtcgaaagtgagtcgtgaagctgatgcgaagaattggcataaacaagcctgacttcaaaggtcataagaatggtataaggggaagattggattagtttggtagatcggtcg

SEQ ID NO: 636 - DNA, 96 bp, Nicotiana tabacum
  misc_feature (9)..(9): N = G, C, A or T
  misc_feature (14)..(14): N = G, C, A or T
  misc_feature (24)..(24): N = G, C, A or T
  misc_feature (26)..(26): N = G, C, A or T
  misc_feature (32)..(32): N = G, C, A or T
  misc_feature (41)..(41): N = G, C, A or T
  misc_feature (46)..(46): N = G, C, A or T
  misc_feature (64)..(64): N = G, C, A or T
  misc_feature (67)..(67): N = G, C, A or T
  misc_feature (77)..(77): N = G, C, A or T
  misc_feature (82)..(82): N = G, C, A or T
  misc_feature (89)..(89): N = G, C, A or T
tccccaaantctgnttgaatgagngngcccanaccaggacngcttngccgctagacccggacanacntcttttcganaaacncatcgancagggca

SEQ ID NO: 637 - DNA, 125 bp, Nicotiana tabacum
  misc_feature (29)..(29): N = G, C, A or T
  misc_feature (44)..(44): N = G, C, A or T
  misc_feature (50)..(50): N = G, C, A or T
  misc_feature (51)..(51): N = G, C, A or T
  misc_feature (67)..(67): N = G, C, A or T
  misc_feature (72)..(72): N = G, C, A or T
  misc_feature (78)..(79): N = G, C, A or T
  misc_feature (84)..(84): N = G, C, A or T
  misc_feature (89)..(89): N = G, C, A or T
  misc_feature (96)..(96): N = G, C, A or T
  misc_feature (120)..(120): N = G, C, A or T
  misc_feature (123)..(123): N = G, C, A or T
tttggaaatcgcccaagacaatttctggnatcggggaagtttgnagaatnnatgctattggcataantcagnagtttnnagatncgaanctgccantagactcgctaaagctggcgcctnacnta

SEQ ID NO: 638 - DNA, 121 bp, Nicotiana tabacum
  misc_feature (24)..(24): N = G, C, A or T
  misc_feature (30)..(30): N = G, C, A or T
  misc_feature (105)..(105): N = G, C, A or T
tgccctaaagccggggaaaatctnattggnggctgaaaatgaaccaaaaaagctgaagacaaaaggaatgatcaaagaaaaggttcgtaaattatattgatacanctctagacagtctcca

SEQ ID NO: 639 - DNA, 47 bp, Nicotiana tabacum
tcaaaaggcaagcaacccctttggtgggcataagggtataaatgccg

SEQ ID NO: 640 - DNA, 67 bp, Nicotiana tabacum
  misc_feature (1)..(1): N = G, C, A or T
  misc_feature (29)..(29): N = G, C, A or T
  misc_feature (50)..(50): N = G, C, A or T
  misc_feature (57)..(57): N = G, C, A or T
  misc_feature (58)..(58): N = G, C, A or T
  misc_feature (65)..(65): N = G, C, A or T
nctctacacagaaactcgaaacctacgcntgacggtcacgatttcagtanccttccnnctcctgngt

SEQ ID NO: 641 - DNA, 88 bp, Nicotiana tabacum
  misc_feature (3)..(3): N = G, C, A or T
  misc_feature (40)..(40): N = G, C, A or T
  misc_feature (79)..(79): N = G, C, A or T
tgnggtgggggagctcgtcacctgtctatcaggaccttgngtatactgcccaacctgaagctatgcaaatgtcacgacnccttagtct

SEQ ID NO: 642 - DNA, 160 bp, Nicotiana tabacum
  misc_feature (9)..(9): N = G, C, A or T
gatccctcnctcaaatgcattctgatcaactaaatttgaaaggcgagggcaatcgatgttatagaaaggggtttcgttggtgaattttctttgttcattttgcgcaacagcttgttgtcttgatagtgaaggagtttattttgtttacagaatattagtc

SEQ ID NO: 643 - DNA, 131 bp, Nicotiana tabacum
cctacatcaccaaagctatcatctatgagctggtggaaggatggaagcactccatgtttcacactgattgaatcacccgtcctaccaaagcattgatgtcttcttctttatgatcacaggcaccctattac

SEQ ID NO: 644 - DNA, 155 bp, Nicotiana tabacum
  misc_feature (8)..(8): N = G, C, A or T
  misc_feature (11)..(11): N = G, C, A or T
  misc_feature (16)..(17): N = G, C, A or T
gaaggccnttncgttnnacaccaatgagcccttttcttctaaaaaacaaaaacacattcaaaaaccatccttagcagcagcaaaagacctctaaaaataagttcaaaccagctttttctttctccctaaatagtatgaaacccgtccaaataagc

SEQ ID NO: 645 - DNA, 169 bp, Nicotiana tabacum
  misc_feature (53)..(53): N = G, C, A or T
aatcttttcaccatcggccgcaataatcgcctctgcggcacgttcaatctggngtgggctcaagaacaacaagtatttggtctgcggatactgcgctgctgctagttcttcttcggtggtttcctcagaatctttcagcgccttgatgcgctttgcatccacttccgcc

SEQ ID NO: 646 - DNA, 163 bp, Nicotiana tabacum
  misc_feature (25)..(25): N = G, C, A or T
  misc_feature (82)..(82): N = G, C, A or T
  misc_feature (113)..(113): N = G, C, A or T
ggctcatatcgattatggatcaganattaccggagaagaaagatttttacctttttagacttatactagggatgaaactctnctactatataaagagaaaggttttcttttgnaacatatactggaacatgcaaatcaaagcaataggagtttattttctgcc

SEQ ID NO: 647 - DNA, 222 bp, Nicotiana tabacum
  misc_feature (3)..(3): N = G, C, A or T
  misc_feature (4)..(4): N = G, C, A or T
  misc_feature (9)..(10): N = G, C, A or T
  misc_feature (19)..(19): N = G, C, A or T
  misc_feature (71)..(71): N = G, C, A or T
  misc_feature (99)..(99): N = G, C, A or T
  misc_feature (114)..(114): N = G, C, A or T
  misc_feature (120)..(120): N = G, C, A or T
  misc_feature (124)..(124): N = G, C, A or T
  misc_feature (127)..(127): N = G, C, A or T
  misc_feature (131)..(131): N = G, C, A or T
  misc_feature (142)..(142): N = G, C, A or T
  misc_feature (150)..(150): N = G, C, A or T
  misc_feature (175)..(175): N = G, C, A or T
  misc_feature (193)..(193): N = G, C, A or T
  misc_feature (203)..(203): N = G, C, A or T
  misc_feature (205)..(205): N = G, C, A or T
  misc_feature (207)..(207): N = G, C, A or T
  misc_feature (211)..(211): N = G, C, A or T
  misc_feature (220)..(220): N = G, C, A or T
gcnntggcnnatcccactntatgggcggtagccaggcgtataccgaggtcggacagatcacttagcgctgncgggggaaaagggctttgcataaccctngcaggactcgtttgntttacncgcntgnagtnaggacctttgntgcgaggnagcccgtaaagccgagcagcaaagncatattcctgagctggtnaaatatttcngncngacnggccacgtncc

SEQ ID NO: 648 - DNA, 289 bp, Nicotiana tabacum
  misc_feature (3)..(3): N = G, C, A or T
  misc_feature (68)..(68): N = G, C, A or T
  misc_feature (109)..(109): N = G, C, A or T
  misc_feature (112)..(112): N = G, C, A or T
  misc_feature (160)..(160): N = G, C, A or T
  misc_feature (179)..(179): N = G, C, A or T
  misc_feature (189)..(189): N = G, C, A or T
  misc_feature (195)..(195): N = G, C, A or T
ccnggaacctattgactcgacctcaatcaaagaaaagggatggtgatttcgctccatttccaggctgnttcctggtgttcaaagggtacttttgagtggcgtttcaggnggncttttttagcaacgacacaactatttcgaacagaggtttcagctgcgnttcgaacagttttgagagngatttctggnggtttncggggctagaaggatgctggtagagttcttgtccgaggttttgacatttcagattcatcgaggtctatttcttccttcctcacgttgtttgtgc

SEQ ID NO: 649 - DNA, 129 bp, Nicotiana tabacum
  misc_feature (2)..(2): N = G, C, A or T
  misc_feature (32)..(32): N = G, C, A or T
cncatcaccaaagctatcatctatgagctggnggaaggatggaagcactccatgtttcacactgattgaatcacccgtcctaccaaagcattgatgtcttcttctttatgatcacaggcaccctattac

SEQ ID NO: 650 - DNA, 144 bp, Nicotiana tabacum
  misc_feature (12)..(12): N = G, C, A or T
  misc_feature (18)..(18): N = G, C, A or T
  misc_feature (89)..(89): N = G, C, A or T
tcgtctacggangattgntcaggtacacgcttctgaaattatggattgatgtacgtttgaattggaagttgagttgaagtaaacaaagnaaatgaatcgttcacctactttcacaatacctgtgtttcaaatgtagcaatagga

SEQ ID NO: 651 - DNA, 165 bp, Nicotiana tabacum
  misc_feature (7)..(8): N = G, C, A or T
  misc_feature (22)..(23): N = G, C, A or T
ctacggnnaactcctcatcttnncccttctactcctttgatgtccagagcaacattttccggtgccggaattgtgaaagggaggtcagcgcgagcagaatcaccagccattgtggcaatttggcatagtaaaaagacaatggaaaggaaggatgaaagttttcga

SEQ ID NO: 652 - DNA, 152 bp, Nicotiana tabacum
  misc_feature (76)..(76): N = G, C, A or T
  misc_feature (86)..(86): N = G, C, A or T
  misc_feature (91)..(91): N = G, C, A or T
  misc_feature (107)..(107): N = G, C, A or T
cgaatgtcctgattgcactgaaatgaaatgaagaggaagcatatttttgttgaaatttccggtggcttcaatgctntcattatagntttgnaataattttggactgnattgaactgatgaactgttaggcttgagtttgatcatttggacta

SEQ ID NO: 653 - DNA, 106 bp, Nicotiana tabacum
  misc_feature (22)..(22): N = G, C, A or T
  misc_feature (77)..(77): N = G, C, A or T
  misc_feature (81)..(81): N = G, C, A or T
ctggtgtcgaacaatgttcagngttttcttctaatggttagttcaagttgttgtggataaatgattatactgtgctnttcntaaacataggatgcatttgtaccat

SEQ ID NO: 654 - DNA, 341 bp, Nicotiana tabacum
  misc_feature (5)..(5): N = G, C, A or T
ttctncggcagaagtcaagctatctatcaagtgcacttgaccatgataaggcgacaatcccggagggtaactctagaggaggtacatgctcgcggctttgatctctcagccgatattgaaaggacgaagattttggaagaagaggctgccactcagctttctgatgaggatgattcagccagtggctctaagagtggaggagacgaagatgaagtccccgagggtgaggctctcgaagatgcggctcctaaagatgaaactgctgaaaatatgaccccgaagtagttttgggtttccttattttgtttctgttcaagtctcccttatgtaaatatctccta

SEQ ID NO: 655 - DNA, 269 bp, Nicotiana tabacum
  misc_feature (2)..(3): N = G, C, A or T
gnntgctcttgatttttctgaaaaatcagaagaatcatcagtgtgttcctctgtggtgtcataccaaggaggtgaggctgaaagtaaagagaatgacgacaattcatctatatggtcaattcaagtgaatgcaagtactaaagatgatgaagaagatgaggaagaaggaggacttgaagaagaagaagaagaatatgatgatgataactatgatgaaaatgaagaagatggagatttagttgatgaactgtgtgaagcaattagcaaga

SEQ ID NO: 656 - DNA, 241 bp, Nicotiana tabacum
  misc_feature (41)..(41): N = G, C, A or T
  misc_feature (146)..(146): N = G, C, A or T
atgaggtgttgggttacatctctatttccctttttgtaccntccacgtggacacttcttctcctttagttttgattctttgtctgcaatgcccctctttccaacctctcaaatgcctggacaacagataatctcgttcttgtttgntgcgacaaatgttgttcataagttgtgtttattataagatattgaacatcatagcttccacttagttctttagctaatgtgaaagttgcttatgg

SEQ ID NO: 657 - DNA, 249 bp, Nicotiana tabacum
acgttgagagccgtaagccagaaactggagaggaagatacaaatgcatctgccggttcaactggagttgatagcatggctgatagcataaaatcattcacttgtaatcagaattttacagatactgaggcttgcacgtcagcaataggtctatcagctcatgatgatcaggcatcagatattgcagaccctgaagaagctgctgtgacagaatcagctgtagtaagtcaggaatgtgcctctaatttgg

SEQ ID NO: 658 - DNA, 227 bp, Nicotiana tabacum
  misc_feature (36)..(36): N = G, C, A or T
  misc_feature (174)..(174): N = G, C, A or T
  misc_feature (182)..(182): N = G, C, A or T
  misc_feature (199)..(199): N = G, C, A or T
ggatgagagaaagccaagtcggacggtttggtgaanccagaactaattcagcagatcgttatagtggacagagaagctgattttgaaaatgctcttcagaatggtggggggaagatagctcctggtggtgtaatcagtgtaaaatccaacaaattcaagcttgagaagcatttngagccggngactgaaaagagtggcnagaaaaagaaacaaaaaaccattctgga

SEQ ID NO: 659 - DNA, 114 bp, Nicotiana tabacum
  misc_feature (7)..(7): N = G, C, A or T
  misc_feature (19)..(19): N = G, C, A or T
  misc_feature (28)..(28): N = G, C, A or T
  misc_feature (47)..(47): N = G, C, A or T
agcctgncctaaaccagtnttcgatctntgctctgctgccatttgtngaaccattggcacagtggaactgaaaagaagaacgcgtccatgctgtccttgtccaatcactgtcca

SEQ ID NO: 660 - DNA, 129 bp, Nicotiana tabacum
  misc_feature (14)..(14): N = G, C, A or T
  misc_feature (22)..(22): N = G, C, A or T
  misc_feature (45)..(45): N = G, C, A or T
  misc_feature (49)..(49): N = G, C, A or T
  misc_feature (55)..(55): N = G, C, A or T
  misc_feature (58)..(58): N = G, C, A or T
  misc_feature (69)..(69): N = G, C, A or T
  misc_feature (77)..(77): N = G, C, A or T
  misc_feature (86)..(86): N = G, C, A or T
aaagcaactgtttnttagagtncatgggtttagccatggcccatncttnattagnccnaaacactcccnaagatatngatattggncacaacaaaggcccgtgcagaagatggtgtgccactcccacca

SEQ ID NO: 661 - DNA, 205 bp, Nicotiana tabacum
  misc_feature (7)..(9): N = G, C, A or T
  misc_feature (43)..(44): N = G, C, A or T
  misc_feature (46)..(46): N = G, C, A or T
  misc_feature (88)..(88): N = G, C, A or T
  misc_feature (104)..(104): N = G, C, A or T
  misc_feature (155)..(155): N = G, C, A or T
  misc_feature (202)..(202): N = G, C, A or T
acggggnnnttgtcccattgacgtatctcacaactattttaanngncaaacccgaagtggtatgtggtgtggtctgcaaatatgaacnctcacattcttcccgnggtgcgtagttagctacaaatatggacgtcatatgtcaggtcaagcaaatngtgcttcatccatgaagtgggctcctcatgcttcaaatgcaatgggnaca

SEQ ID NO: 662 - DNA, 54 bp, Nicotiana tabacum
  misc_feature (25)..(25): N = G, C, A or T
  misc_feature (33)..(33): N = G, C, A or T
  misc_feature (40)..(40): N = G, C, A or T
  misc_feature (45)..(46): N = G, C, A or T
ttgagaaagttttgtttttaagacnggttgctnggaaagnatggnngttggcca

SEQ ID NO: 663 - DNA, 223 bp, Nicotiana tabacum
  misc_feature (3)..(4): N = G, C, A or T
  misc_feature (28)..(28): N = G, C, A or T
  misc_feature (34)..(34): N = G, C, A or T
  misc_feature (46)..(46): N = G, C, A or T
  misc_feature (56)..(57): N = G, C, A or T
  misc_feature (61)..(61): N = G, C, A or T
  misc_feature (64)..(65): N = G, C, A or T
  misc_feature (81)..(81): N = G, C, A or T
  misc_feature (91)..(91): N = G, C, A or T
  misc_feature (94)..(94): N = G, C, A or T
  misc_feature (100)..(100): N = G, C, A or T
  misc_feature (105)..(105): N = G, C, A or T
  misc_feature (107)..(107): N = G, C, A or T
  misc_feature (110)..(110): N = G, C, A or T
  misc_feature (112)..(112): N = G, C, A or T
  misc_feature (117)..(117): N = G, C, A or T
  misc_feature (120)..(120): N = G, C, A or T
  misc_feature (122)..(122): N = G, C, A or T
  misc_feature (125)..(125): N = G, C, A or T
  misc_feature (136)..(136): N = G, C, A or T
  misc_feature (143)..(143): N = G, C, A or T
  misc_feature (150)..(151): N = G, C, A or T
  misc_feature (170)..(170): N = G, C, A or T
  misc_feature (177)..(177): N = G, C, A or T
  misc_feature (186)..(186): N = G, C, A or T
  misc_feature (199)..(199): N = G, C, A or T
  misc_feature (207)..(207): N = G, C, A or T
  misc_feature (210)..(210): N = G, C, A or T
  misc_feature (217)..(217): N = G, C, A or T
ttnnaatagccatacaaggtatatcggnggttantgcatgtttttnaacttatggnncacncannattgttgttgatccanggtcacaaanagncaagcngtcangntgnangaganaantnaanaatggaggcanatgtggngatgtanntaccagttgtgaacaatangacatgnactgttcgncatgattggcacnatttgtgnggngaatccnaagcaa

SEQ ID NO: 664 - DNA, 207 bp, Nicotiana tabacum
  misc_feature (3)..(3): N = G, C, A or T
gangaccctatgctgatgatccctatgcgtttggctagaggtgaagatgtcccactccagtgcagagcttcctagagaatctgaaactttgacctggaaatgtgtgtgcgctgattctttgattgcagacgtatagctggctgctttccacattgcaaggaactagaattttacttcccccaaaaataaaactgtatataactgcaa

SEQ ID NO: 665 - DNA, 308 bp, Nicotiana tabacum
  misc_feature (10)..(10): N = G, C, A or T
  misc_feature (41)..(41): N = G, C, A or T
  misc_feature (51)..(51): N = G, C, A or T
  misc_feature (52)..(52): N = G, C, A or T
  misc_feature (95)..(95): N = G, C, A or T
  misc_feature (107)..(107): N = G, C, A or T
  misc_feature (108)..(108): N = G, C, A or T
  misc_feature (135)..(135): N = G, C, A or T
  misc_feature (137)..(138): N = G, C, A or T
  misc_feature (176)..(176): N = G, C, A or T
  misc_feature (186)..(186): N = G, C, A or T
  misc_feature (187)..(187): N = G, C, A or T
  misc_feature (204)..(204): N = G, C, A or T
ccctatgcgnttggctagaggtgaagaatgtcccactccanggcaaagctnnctagagaatctgaaactttgacctggaaatgtgtgtgcgctcnactttgattgcnntacgtatagctggctgctttccacatngnnaggaactagaattttacttcccccaaaaataaaactgnatataactgnnattactcaggactcatnatcctcctgctcaagttgctcaagttcctggagcagaagtgatccctgctccagctcctactggctgggaatgagacctgcttcctttagaaagttctttttga

SEQ ID NO: 666 - DNA, 206 bp, Nicotiana tabacum
  misc_feature (3)..(4): N = G, C, A or T
  misc_feature (6)..(6): N = G, C, A or T
  misc_feature (11)..(11): N = G, C, A or T
  misc_feature (18)..(18): N = G, C, A or T
  misc_feature (35)..(35): N = G, C, A or T
  misc_feature (64)..(64): N = G, C, A or T
  misc_feature (73)..(73): N = G, C, A or T
  misc_feature (83)..(83): N = G, C, A or T
  misc_feature (87)..(87): N = G, C, A or T
  misc_feature (97)..(97): N = G, C, A or T
  misc_feature (102)..(102): N = G, C, A or T
  misc_feature (117)..(118): N = G, C, A or T
  misc_feature (120)..(121): N = G, C, A or T
  misc_feature (131)..(131): N = G, C, A or T
  misc_feature (147)..(147): N = G, C, A or T
  misc_feature (155)..(155): N = G, C, A or T
  misc_feature (158)..(158): N = G, C, A or T
ganngncgtanacgaagncaggggactgaatcatnaagtatgcacaacggagctctatttgttngttccaccntgtgttgggngggnggagtggctncctantgatatgtatgtatnntnngagccaaagntcatattatacttaancctactgngcncctataaagagaatgccgcgagattcagaagatgcttctgatctgtga

SEQ ID NO: 667 - DNA, 218 bp, Nicotiana tabacum
ggaggctaataagttgaaggcattgcagagagctgctgctcgaacctctcatatcaagtctacgtgatggttttcacatagagctccatagaggtttctaactaattatatcctttcttattgtaaatgcttcagattaccttcaatcttgaacgtccagagacttgtccaaatgataaatctttttactctttcacccaaattggatgtcattttca

SEQ ID NO: 668 - DNA, 222 bp, Nicotiana tabacum
aatctgaagggtcagaagaatcatcagtgtgttcctctgtggtgacataccaaggaggtgaggctgaaagtaaagagaatgacgacaattcatctatgtggtcgattcaagtgaatgcaagtactaaagatgatgaagaagatgaggaagaaggaggacttgaagaagaagaagaagaatatggagatttagttgatgaactgtgtgaagcaattagcaaga

SEQ ID NO: 669 - DNA, 111 bp, Nicotiana tabacum
  misc_feature (5)..(5): N = G, C, A or T
  misc_feature (30)..(30): N = G, C, A or T
gccancccagtcgacaagaccagcgcctgnacgtaaaaatctgatacctgactaagcttatgtcctgagggagccaacctccctcaggcgtctgttactacctgctggctt

SEQ ID NO: 670 - DNA, 167 bp, Nicotiana tabacum
  misc_feature (11)..(11): N = G, C, A or T
  misc_feature (36)..(36): N = G, C, A or T
  misc_feature (58)..(58): N = G, C, A or T
  misc_feature (65)..(65): N = G, C, A or T
  misc_feature (86)..(86): N = G, C, A or T
  misc_feature (89)..(89): N = G, C, A or T
  misc_feature (112)..(112): N = G, C, A or T
  misc_feature (124)..(124): N = G, C, A or T
  misc_feature (128)..(129): N = G, C, A or T
  misc_feature (130)..(130): N = G, C, A or T
  misc_feature (133)..(133): N = G, C, A or T
  misc_feature (138)..(138): N = G, C, A or T
  misc_feature (140)..(140): N = G, C, A or T
  misc_feature (151)..(151): N = G, C, A or T
  misc_feature (161)..(161): N = G, C, A or T
  misc_feature (163)..(163): N = G, C, A or T
  misc_feature (165)..(165): N = G, C, A or T
gccggctctgngtccacctgactatcagaagcggcncagatgattgcatctgtattanaaacaanggaatctccatcttccatgantgngcctatagacatctctctataantcattttttttncttnnncanaaatngncggagatactntagcttcatnantngt

SEQ ID NO: 671 - DNA, 131 bp, Nicotiana tabacum
  misc_feature (24)..(24): N = G, C, A or T
  misc_feature (26)..(26): N = G, C, A or T
  misc_feature (50)..(50): N = G, C, A or T
  misc_feature (51)..(52): N = G, C, A or T
  misc_feature (61)..(61): N = G, C, A or T
  misc_feature (85)..(85): N = G, C, A or T
  misc_feature (89)..(89): N = G, C, A or T
  misc_feature (124)..(124): N = G, C, A or T
  misc_feature (129)..(129): N = G, C, A or T
gggcaagtggatggtgggtactgncncgttcggagctcgaaggtttctgnnnctggattgnctgtctataccattatgtgatgtnaccnagatggcatcgcatcttgaggcccactctcatctngcttntg

SEQ ID NO: 672 - DNA, 146 bp, Nicotiana tabacum
  misc_feature (3)..(3): N = G, C, A or T
  misc_feature (6)..(6): N = G, C, A or T
  misc_feature (13)..(13): N = G, C, A or T
  misc_feature (16)..(16): N = G, C, A or T
ggngcnattgccnaantgtgcttcttgctggatatcatgtgtgagtgttatcttcaagaacctcacaaatttgtagttgatcagaatctttgcaatgcgttttctcattttctttcatttgtgcttcctttattttgtcttttacg

SEQ ID NO: 673 - DNA, 155 bp, Nicotiana tabacum
  misc_feature (25)..(25): N = G, C, A or T
  misc_feature (30)..(32): N = G, C, A or T
  misc_feature (36)..(36): N = G, C, A or T
  misc_feature (50)..(51): N = G, C, A or T
  misc_feature (53)..(55): N = G, C, A or T
  misc_feature (57)..(57): N = G, C, A or T
  misc_feature (67)..(67): N = G, C, A or T
  misc_feature (95)..(95): N = G, C, A or T
  misc_feature (106)..(106): N = G, C, A or T
  misc_feature (114)..(114): N = G, C, A or T
  misc_feature (124)..(124): N = G, C, A or T
  misc_feature (155)..(155): N = G, C, A or T
ggtgctgaattggaggaaggagaanaggannnggangaggaatgcctagnngnnngngtgcatagantccaactgagtcacgcaagaaaccagtntgttccactgnttggcttnctgctagggntgttgagtctttgaataagaacgttgatggn

SEQ ID NO: 674 - DNA, 248 bp, Nicotiana tabacum
caccattcttgatcgtagtccgagattccacggtgagctgctcccttcctatgtcgttcagcagcatgatggagtctctctttgcttttggttgtctattctatttcagacagttggatagatttattcttttatatattctgctagatgcccatatacttgtgacaccaggtcttgacacacacattagtagactattcttttgggattgtataattattattgtacgttgctaattatcacttggt

SEQ ID NO: 675 - DNA, 292 bp, Nicotiana tabacum
  misc_feature (6)..(7): N = G, C, A or T
  misc_feature (9)..(9): N = G, C, A or T
  misc_feature (12)..(12): N = G, C, A or T
  misc_feature (28)..(29): N = G, C, A or T
  misc_feature (33)..(33): N = G, C, A or T
  misc_feature (49)..(49): N = G, C, A or T
  misc_feature (56)..(56): N = G, C, A or T
  misc_feature (62)..(62): N = G, C, A or T
  misc_feature (73)..(73): N = G, C, A or T
  misc_feature (79)..(79): N = G, C, A or T
  misc_feature (83)..(83): N = G, C, A or T
  misc_feature (100)..(100): N = G, C, A or T
  misc_feature (109)..(109): N = G, C, A or T
  misc_feature (113)..(113): N = G, C, A or T
  misc_feature (139)..(140): N = G, C, A or T
  misc_feature (146)..(146): N = G, C, A or T
  misc_feature (148)..(148): N = G, C, A or T
  misc_feature (154)..(155): N = G, C, A or T
  misc_feature (159)..(159): N = G, C, A or T
  misc_feature (171)..(171): N = G, C, A or T
  misc_feature (176)..(177): N = G, C, A or T
  misc_feature (180)..(180): N = G, C, A or T
  misc_feature (181)..(182): N = G, C, A or T
  misc_feature (200)..(200): N = G, C, A or T
  misc_feature (259)..(259): N = G, C, A or T
  misc_feature (264)..(264): N = G, C, A or T
  misc_feature (270)..(270): N = G, C, A or T
  misc_feature (286)..(286): N = G, C, A or T
gggggnngnttntctctccgctggaaanntgantgacttgggtgctaantgatggnagaccnacacacccaanaagggnaagnggaaaggacgacatggntcaatagcncagngagggagacagacggaatgaaacganncaaganantggggnnaccntgttctatttantgtgnnagnnnaaacaacccacgttcctnacaaaacaaacagtattttggatcggagactaatctgaattttccagacgagttttttncggtnaatctngaggttccgacatggntttttg

SEQ ID NO: 676 - DNA, 44 bp, Nicotiana tabacum
  misc_feature (8)..(8): N = G, C, A or T
  misc_feature (10)..(10): N = G, C, A or T
  misc_feature (13)..(13): N = G, C, A or T
tagggaancnatnctcatttgttatgaccaccatttacttagct

SEQ ID NO: 677 - DNA, 119 bp, Nicotiana tabacum
  misc_feature (4)..(4): N = G, C, A or T
  misc_feature (6)..(6): N = G, C, A or T
  misc_feature (9)..(9): N = G, C, A or T
  misc_feature (33)..(33): N = G, C, A or T
  misc_feature (74)..(74): N = G, C, A or T
  misc_feature (75)..(75): N = G, C, A or T
  misc_feature (91)..(91): N = G, C, A or T
  misc_feature (95)..(95): N = G, C, A or T
  misc_feature (102)..(102): N = G, C, A or T
  misc_feature (112)..(112): N = G, C, A or T
ctcngntancaacacggctggataaacttcagngctcccggtgtgggtctatttatcggagtttgagcacgacnnacaccccgggaccatntagntaggatngctcattcangaatagc

SEQ ID NO: 678 - DNA, 308 bp, Nicotiana tabacum
tcagaatgcgaatttgcctactcaaatgaacgagattcctgctaagtggaatggcaatccggaaggttgtagttttgttcgtccaagctctttctcggcttcctcatcacctgcaggtccttttagatcatcatctttgtattattctgccggcttttcataaccaagaatgttgccttgcatgggcatttactctcatgacagacaatagaaacctgacgcttacaaagcataaatatagcagtctgaacgaaaacacacacggcaagtttgagcagatgagttattctagatttgcaggttttgct

SEQ ID NO: 679 - DNA, 69 bp, Nicotiana tabacum
  misc_feature (18)..(18): N = G, C, A or T
  misc_feature (30)..(30): N = G, C, A or T
  misc_feature (41)..(41): N = G, C, A or T
  misc_feature (67)..(67): N = G, C, A or T
tttggccatacaaagggntgaatatgaggnatatggggggntaggcatatgtcgcacaaaccctggnat

SEQ ID NO: 680 - DNA, 73 bp, Nicotiana tabacum
accctaccgggaggatcatatgagcgtgggttctactggcctcgacgtcctctgtagttggaagggaaaccat

SEQ ID NO: 681 - DNA, 17 bp, Nicotiana tabacum
ggtgttttaggttgtct

SEQ ID NO: 682 - DNA, 67 bp, Nicotiana tabacum
  misc_feature (2)..(2): N = G, C, A or T
  misc_feature (8)..(8): N = G, C, A or T
  misc_feature (24)..(24): N = G, C, A or T
  misc_feature (28)..(28): N = G, C, A or T
  misc_feature (32)..(32): N = G, C, A or T
  misc_feature (40)..(40): N = G, C, A or T
  misc_feature (42)..(42): N = G, C, A or T
  misc_feature (45)..(45): N = G, C, A or T
  misc_feature (58)..(58): N = G, C, A or T
tngccccngccagtcggacagaancggntagnaccgaagncnatnctgccacgggcanggaagacgt

SEQ ID NO: 683 - DNA, 119 bp, Nicotiana tabacum
agaggtggtgggactgttcgttcggtgctcgaggtttctggttctgatttctgtctataccattattgttgtaaccgagatggcatcgcatcttgaggtccactctcatcttgcttatg

SEQ ID NO: 684 - DNA, 261 bp, Nicotiana tabacum
  misc_feature (3)..(3): N = G, C, A or T
  misc_feature (5)..(5): N = G, C, A or T
  misc_feature (7)..(7): N = G, C, A or T
  misc_feature (8)..(8): N = G, C, A or T
  misc_feature (14)..(14): N = G, C, A or T
  misc_feature (26)..(26): N = G, C, A or T
  misc_feature (28)..(28): N = G, C, A or T
  misc_feature (32)..(32): N = G, C, A or T
  misc_feature (43)..(43): N = G, C, A or T
  misc_feature (46)..(46): N = G, C, A or T
  misc_feature (61)..(61): N = G, C, A or T
  misc_feature (69)..(69): N = G, C, A or T
  misc_feature (115)..(115): N = G, C, A or T
gcngngnncaaggnggctacctgacntnactnaataaatcaanctntttgaactcagggtntataggangagatggaggctcatgcatggttgacaccagggttactggaaaganggtttatcatccaaaccataacattgacactgaggatgatgcacttgcgctgaagttgtcatcaaccacaaccattgcttcagataatacgagctcattatctaatgaggaatcagcaaacttagcaagtgttacttcactttctg

SEQ ID NO: 685 - DNA, 100 bp, Nicotiana tabacum
cgttacatattaggagtataattttttcattactaaagcatgtaaatatgttgctccgggctttggtctattagtaagagcgcaatgcgtgatatgtggg

SEQ ID NO: 686 - DNA, 97 bp, Nicotiana tabacum
  misc_feature (3)..(3): N = G, C, A or T
  misc_feature (12)..(12): N = G, C, A or T
  misc_feature (13)..(13): N = G, C, A or T
  misc_feature (14)..(16): N = G, C, A or T
  misc_feature (27)..(27): N = G, C, A or T
  misc_feature (31)..(31): N = G, C, A or T
  misc_feature (35)..(35): N = G, C, A or T
  misc_feature (45)..(45): N = G, C, A or T
tcnagcaattannnnntttggcctgcnggtncctntggcgctgangatctctatgccccgccggcagacggtggattggatgatgacaatgctcacg

SEQ ID NO: 687 - DNA, 166 bp, Nicotiana tabacum
  misc_feature (4)..(7): N = G, C, A or T
  misc_feature (12)..(13): N = G, C, A or T
  misc_feature (15)..(16): N = G, C, A or T
  misc_feature (33)..(33): N = G, C, A or T
  misc_feature (36)..(36): N = G, C, A or T
  misc_feature (44)..(44): N = G, C, A or T
  misc_feature (50)..(50): N = G, C, A or T
  misc_feature (60)..(60): N = G, C, A or T
  misc_feature (70)..(70): N = G, C, A or T
  misc_feature (84)..(84): N = G, C, A or T
  misc_feature (99)..(101): N = G, C, A or T
  misc_feature (125)..(125): N = G, C, A or T
  misc_feature (141)..(141): N = G, C, A or T
  misc_feature (146)..(146): N = G, C, A or T
  misc_feature (162)..(162): N = G, C, A or T
tggnnnntcctnncnngccaataaccagccccnggngctatcancataanctaaaaaganccccatacantcaacctggctggnccatcacttagggcnnngtttcaagattatccaacttgggnaatacttatccgccangatcnatagccggatcagacngacg

SEQ ID NO: 688 - DNA, 217 bp, Nicotiana tabacum
  misc_feature (67)..(67): N = G, C, A or T
aagacagggatggcagtgctgagaggagggcaaagattgagcaatggaatagggaaaaagaagaggnagaatctgctaaatacaataattttgacactgataatggcaagagtgatggtggtgatcactatggagaacagtttgatgacgattacccgaagcagcagtaggtagcaaatgggaagttatgggctactgatagtagtggttactctgg

SEQ ID NO: 689 - DNA, 471 bp, Nicotiana tabacum
  misc_feature (1)..(1): N = G, C, A or T
  misc_feature (4)..(4): N = G, C, A or T
  misc_feature (10)..(10): N = G, C, A or T
  misc_feature (12)..(13): N = G, C, A or T
  misc_feature (18)..(18): N = G, C, A or T
  misc_feature (19)..(19): N = G, C, A or T
  misc_feature (22)..(22): N = G, C, A or T
  misc_feature (46)..(46): N = G, C, A or T
  misc_feature (66)..(66): N = G, C, A or T
  misc_feature (71)..(71): N = G, C, A or T
  misc_feature (98)..(98): N = G, C, A or T
  misc_feature (108)..(108): N = G, C, A or T
  misc_feature (133)..(133): N = G, C, A or T
  misc_feature (162)..(162): N = G, C, A or T
  misc_feature (194)..(194): N = G, C, A or T
  misc_feature (356)..(356): N = G, C, A or T
  misc_feature (366)..(366): N = G, C, A or T
  misc_feature (407)..(407): N = G, C, A or T
  misc_feature (429)..(429): N = G, C, A or T
  misc_feature (446)..(446): N = G, C, A or T
  18misc_feature (446)..(446): N = G, C, A or T
naancccagnannattcnngangcaagggttgatagcgactatcanggctgatgatttttcaccgngcttnggcgggagtagcctgtgctcattgacnggaacccgtntcgcaggaccttcgccatgaatcgntttctcgccatttccgtattgctcgtcanctcagtccttgccggttgcgcgacacattcgncgcctgaactgcgtgcctactcggcggaagagagcaaggagctggcgctggaagccctgagccgtcgaggcctgtcgtttgatgaataccaacagaagaaagccgaactgaccggccagccacaaaaaacctttggtttcgaccgcagggtgaaatgaatgncgagcgcggnatgacgctccacggcgcccaggtgagttaagtgacagggcntgaaaagccgagggttccacangaacctcgggtttttgntttgccatcccgtttccggagcctg

SEQ ID NO: 690 - DNA, 68 bp, Nicotiana tabacum
  misc_feature (5)..(5): N = G, C, A or T
  misc_feature (7)..(7): N = G, C, A or T
  misc_feature (10)..(10): N = G, C, A or T
  misc_feature (14)..(14): N = G, C, A or T
  misc_feature (21)..(22): N = G, C, A or T
  misc_feature (26)..(26): N = G, C, A or T
  misc_feature (27)..(27): N = G, C, A or T
ccatnanttnacantgctggnncatnnacaacccggtgcgcggttcgccgttgcgcggcagttccggc

SEQ ID NO: 691 - DNA, 119 bp, Nicotiana tabacum
cggtacgagaagcgtgtgattcaaaaacaactgtgatcatgcaaagtattgagatggaatcttggaatgcatggaactagcgttagatttggttgaaatttgtaattctaatcgcaagc

SEQ ID NO: 692 - DNA, 120 bp, Nicotiana tabacum
gggcctcctagcaacatttaggaaccgaataacagcacttctcagtctatacggcatcctgatttgttcatcagctcgtatttcacaggctaccatatcaccagtgttccatgctcagcc

SEQ ID NO: 693 - DNA, 141 bp, Nicotiana tabacum
  misc_feature (5)..(5): N = G, C, A or T
  misc_feature (23)..(23): N = G, C, A or T
cctcnggcaggtactcaatagcnaacaacttttacatcctcaaattagcacaaatctacatatttcatatacagaacactatagtagagttcatgtttagactattgccaagtctgcatgatctaaacaacaacttccacc

SEQ ID NO: 694 - DNA, 165 bp, Nicotiana tabacum
tttcttgttgctcgtgaagagccaataaccagcccccgcagctatcaacataatcaaaaaagaaccaccatagatcaacctggtaggcccatcacttagggcaactttcagattatccaacttcgaaatcttatccgccataatcaatagccgctcagactgacg

SEQ ID NO: 695 - DNA, 56 bp, Nicotiana tabacum
  misc_feature (7)..(7): N = G, C, A or T
  misc_feature (10)..(10): N = G, C, A or T
  misc_feature (13)..(13): N = G, C, A or T
  misc_feature (34)..(34): N = G, C, A or T
  misc_feature (35)..(35): N = G, C, A or T
  misc_feature (48)..(48): N = G, C, A or T
tggtcgntgnaanaattttgctggaagctttgtnnaatgaaaaattgntgcttcag

SEQ ID NO: 696 - DNA, 133 bp, Nicotiana tabacum
gccagctaagtggctttataacaccaaaagaaagaggccttaggacaactaaatatgacatacacttagacaacatgaatttgccaatttatctgttactatttccattgacctctaaactcacctccatgca

SEQ ID NO: 697 - DNA, 155 bp, Nicotiana tabacum
  misc_feature (1)..(1): N = G, C, A or T
  misc_feature (108)..(108): N = G, C, A or T
ncgtagctatctttgctgcttctttgatgctttgaatcatctttgatctgtgacgatattttgtgttttatttcgccggagttgaacagttaggagtttatttatggntttatttttcactgttttttgttcattcttttttttacttcttgaca

SEQ ID NO: 698 - DNA, 215 bp, Nicotiana tabacum
gatgcatgtgtcacagaagagatgccatagttccatattaggaattgataagatgtgctaagatcaatataggtcacttagtattattctcttctaggcactagtttcaggtcatattttagttttatgggatgcatttcgtaaacttgttcttgcctttcagtttcattttgtatgtatatgtcactggtccatattgttgttgacactcggca

SEQ ID NO: 699 - DNA, 327 bp, Nicotiana tabacum
  misc_feature (33)..(33): N = G, C, A or T
  misc_feature (48)..(48): N = G, C, A or T
  misc_feature (69)..(69): N = G, C, A or T
  misc_feature (79)..(79): N = G, C, A or T
  misc_feature (114)..(114): N = G, C, A or T
  misc_feature (123)..(123): N = G, C, A or T
  misc_feature (135)..(135): N = G, C, A or T
  misc_feature (138)..(138): N = G, C, A or T
  misc_feature (144)..(144): N = G, C, A or T
  misc_feature (171)..(171): N = G, C, A or T
  misc_feature (179)..(179): N = G, C, A or T
  misc_feature (186)..(186): N = G, C, A or T
  misc_feature (189)..(189): N = G, C, A or T
  misc_feature (194)..(194): N = G, C, A or T
  misc_feature (207)..(207): N = G, C, A or T
  misc_feature (238)..(238): N = G, C, A or T
  misc_feature (239)..(239): N = G, C, A or T
  misc_feature (243)..(243): N = G, C, A or T
  misc_feature (252)..(252): N = G, C, A or T
  misc_feature (267)..(267): N = G, C, A or T
  misc_feature (268)..(268): N = G, C, A or T
  misc_feature (285)..(285): N = G, C, A or T
  misc_feature (288)..(288): N = G, C, A or T
  misc_feature (292)..(292): N = G, C, A or T
  misc_feature (310)..(310): N = G, C, A or T
  misc_feature (314)..(314): N = G, C, A or T
  misc_feature (317)..(317): N = G, C, A or T
  misc_feature (319)..(319): N = G, C, A or T
  misc_feature (322)..(322): N = G, C, A or T
  misc_feature (326)..(326): N = G, C, A or T
gatggacgtgttattggtggtggagttgccggnctattggtaggctgncagtcctgtgcagattgttgngggcagcttncttgatggaattcagctcgagcagacgaccaaganaaacaagtncgagcccatagntgnagctgntcctctatctagtacagatatggaaancgcctatnactcatnatnagcanaaccaactgtagnatcggattcttccttacatgaagataactgnncatnattagcccncgacttgaggaatanncctgctgacatcaatgnatntaancctgcataggtttttgtngaantgnanttnatcng

SEQ ID NO: 700 - DNA, 52 bp, Nicotiana tabacum
  misc_feature (1)..(1): N = G, C, A or T
  misc_feature (16)..(16): N = G, C, A or T
  misc_feature (23)..(23): N = G, C, A or T
  misc_feature (36)..(36): N = G, C, A or T
  misc_feature (37)..(37): N = G, C, A or T
  misc_feature (43)..(43): N = G, C, A or T
  misc_feature (45)..(45): N = G, C, A or T
  misc_feature (50)..(50): N = G, C, A or T
nctgaagaaggtcctntcgggangaaatagctaggnngtcttngnttcanct

SEQ ID NO: 701 - DNA, 78 bp, Nicotiana tabacum
  misc_feature (1)..(1): N = G, C, A or T
  misc_feature (63)..(63): N = G, C, A or T
nctgattgttcttacaaataggtcaatcttagtccaagtaagtatattctcttacttctgtanttttccagatttggt

SEQ ID NO: 702 - DNA, 81 bp, Nicotiana tabacum
  misc_feature (49)..(49): N = G, C, A or T
  misc_feature (61)..(61): N = G, C, A or T
  misc_feature (64)..(64): N = G, C, A or T
  misc_feature (67)..(68): N = G, C, A or T
  misc_feature (72)..(72): N = G, C, A or T
taagggatcacgaccctacgggagatcatatgagcgtgggttctactgnctcgacgggctntgnagnngganggaaaccat

SEQ ID NO: 703 - DNA, 106 bp, Nicotiana tabacum
  misc_feature (4)..(4): N = G, C, A or T
  misc_feature (17)..(17): N = G, C, A or T
  misc_feature (19)..(19): N = G, C, A or T
  misc_feature (36)..(36): N = G, C, A or T
  misc_feature (79)..(79): N = G, C, A or T
  misc_feature (90)..(90): N = G, C, A or T
gaangaaggttccaagngnctcccattgtggagcantatcacctacacattgtagggctaattatcttttcacttcacncggtagaggancagattgcatagctgt

SEQ ID NO: 704 - DNA, 129 bp, Nicotiana tabacum
  misc_feature (1)..(1): N = G, C, A or T
  misc_feature (2)..(2): N = G, C, A or T
  misc_feature (41)..(41): N = G, C, A or T
  misc_feature (66)..(66): N = G, C, A or T
nntgatgtcccttcctttctggtgtcgtatccggctttttncgtggaagcggtgttgctaaatcgngtgtccgacggccctttactgtactggaacgacatttctcattttgttgctgctgtttacggt

SEQ ID NO: 705 - DNA, 97 bp, Nicotiana tabacum
gatatcttcatctttgcgctttatgttcttcacatccacaagtattggtgtgttttctgcattatcatttctcagtagtttccttctctgtttctcc

SEQ ID NO: 706 - DNA, 20 bp, Nicotiana tabacum
  misc_feature (13)..(13): N = G, C, A or T
cgaagaagaaganacttacg

SEQ ID NO: 707 - DNA, 87 bp, Nicotiana tabacum
  misc_feature (17)..(17): N = G, C, A or T
  misc_feature (19)..(19): N = G, C, A or T
  misc_feature (39)..(39): N = G, C, A or T
  misc_feature (44)..(44): N = G, C, A or T
  misc_feature (49)..(49): N = G, C, A or T
  misc_feature (60)..(60): N = G, C, A or T
  misc_feature (65)..(66): N = G, C, A or T
  misc_feature (73)..(74): N = G, C, A or T
  misc_feature (82)..(82): N = G, C, A or T
cacggaaatcacgccgncnttggtaccttgaccgggttncctanagggnacttcagtcantgggnngcccagnnactgaggnggccg

SEQ ID NO: 708 - DNA, 66 bp, Nicotiana tabacum
  misc_feature (11)..(11): N = G, C, A or T
catctggattnaacaatttcatggccaggttttcaaaaaaataaaacaaggtcttcatggccgtgc

SEQ ID NO: 709 - DNA, 70 bp, Nicotiana tabacum
  misc_feature (1)..(1): N = G, C, A or T
naaccttactgtacaaaggaaatcattggttgcttgggataaagtctgcatgcccaaaactgaggtggcc

SEQ ID NO: 710 - DNA, 138 bp, Nicotiana tabacum
  misc_feature (4)..(5): N = G, C, A or T
  misc_feature (40)..(40): N = G, C, A or T
  misc_feature (46)..(46): N = G, C, A or T
  misc_feature (66)..(66): N = G, C, A or T
  misc_feature (85)..(85): N = G, C, A or T
  misc_feature (101)..(102): N = G, C, A or T
  misc_feature (105)..(105): N = G, C, A or T
  misc_feature (110)..(110): N = G, C, A or T
  misc_feature (130)..(130): N = G, C, A or T
cggnnttttgacaaaggttcccgcttacacactcctcgtncgatgngctccctgacccgagtgttntcgcgcagcagtgtcatgntcaaaaccaggattgnnttnaaaangacaggacttcaggtcattnattccgcc

SEQ ID NO: 711 - DNA, 48 bp, Nicotiana tabacum
  misc_feature (4)..(4): N = G, C, A or T
  misc_feature (6)..(6): N = G, C, A or T
  misc_feature (7)..(7): N = G, C, A or T
attntnntttttggaatggtaaatacaggttggatagaagctttccca

SEQ ID NO: 712 - DNA, 66 bp, Nicotiana tabacum
  misc_feature (8)..(8): N = G, C, A or T
  misc_feature (14)..(14): N = G, C, A or T
  misc_feature (64)..(64): N = G, C, A or T
gcaaatanttatangaaaaggtcaaggaaacactaagtgtgtcataaataggattatctattanta

SEQ ID NO: 713 - DNA, 82 bp, Nicotiana tabacum
  misc_feature (3)..(4): N = G, C, A or T
  misc_feature (10)..(10): N = G, C, A or T
  misc_feature (12)..(12): N = G, C, A or T
  misc_feature (24)..(24): N = G, C, A or T
  misc_feature (26)..(26): N = G, C, A or T
  misc_feature (62)..(62): N = G, C, A or T
  misc_feature (75)..(75): N = G, C, A or T
  misc_feature (78)..(78): N = G, C, A or T
ctnnctttgntngacgagagtaanancttggcagctatcttccaagccattttcaagggctntgcatctgtagtnctntgca

SEQ ID NO: 714 - DNA, 57 bp, Nicotiana tabacum
ctgatagtctgatgggcttccctttgagggtaacccgacctttctctctggctgccc

SEQ ID NO: 715 - DNA, 54 bp, Nicotiana tabacum
  misc_feature (3)..(3): N = G, C, A or T
  misc_feature (11)..(11): N = G, C, A or T
  misc_feature (13)..(13): N = G, C, A or T
  misc_feature (28)..(28): N = G, C, A or T
  misc_feature (29)..(30): N = G, C, A or T
  misc_feature (36)..(36): N = G, C, A or T
  misc_feature (43)..(43): N = G, C, A or T
ganccagcggnantagctgctgtactannnacaggnatccaanatatgaaagct

SEQ ID NO: 716 - DNA, 113 bp, Nicotiana tabacum
  misc_feature (6)..(6): N = G, C, A or T
  misc_feature (40)..(40): N = G, C, A or T
  misc_feature (69)..(69): N = G, C, A or T
  misc_feature (80)..(80): N = G, C, A or T
  misc_feature (104)..(104): N = G, C, A or T
  misc_feature (109)..(109): N = G, C, A or T
agcacntccggctgtatcttactaccagagaaattacagntgtggacatatctcgaagatgaatcaatngaatatatctnctaatgaaattgtcttgctctttngttgngtat

SEQ ID NO: 717 - DNA, 291 bp, Nicotiana tabacum
  misc_feature (16)..(16): N = G, C, A or T
  misc_feature (40)..(40): N = G, C, A or T
  misc_feature (43)..(43): N = G, C, A or T
  misc_feature (48)..(49): N = G, C, A or T
  misc_feature (56)..(56): N = G, C, A or T
  misc_feature (65)..(65): N = G, C, A or T
  misc_feature (97)..(97): N = G, C, A or T
  misc_feature (113)..(114): N = G, C, A or T
  misc_feature (123)..(123): N = G, C, A or T
  misc_feature (163)..(163): N = G, C, A or T
  misc_feature (166)..(166): N = G, C, A or T
  misc_feature (175)..(176): N = G, C, A or T
  misc_feature (182)..(182): N = G, C, A or T
  misc_feature (184)..(184): N = G, C, A or T
  misc_feature (192)..(192): N = G, C, A or T
  misc_feature (200)..(200): N = G, C, A or T
  misc_feature (209)..(209): N = G, C, A or T
  misc_feature (221)..(221): N = G, C, A or T
  misc_feature (224)..(224): N = G, C, A or T
  misc_feature (229)..(229): N = G, C, A or T
  misc_feature (233)..(233): N = G, C, A or T
  misc_feature (235)..(235): N = G, C, A or T
  misc_feature (236)..(236): N = G, C, A or T
  misc_feature (244)..(244): N = G, C, A or T
  misc_feature (245)..(247): N = G, C, A or T
  misc_feature (250)..(250): N = G, C, A or T
  misc_feature (256)..(256): N = G, C, A or T
  misc_feature (259)..(259): N = G, C, A or T
  misc_feature (262)..(262): N = G, C, A or T
  misc_feature (267)..(267): N = G, C, A or T
  misc_feature (270)..(270): N = G, C, A or T
  misc_feature (273)..(273): N = G, C, A or T
  misc_feature (275)..(275): N = G, C, A or T
  misc_feature (280)..(280): N = G, C, A or T
  misc_feature (287)..(288): N = G, C, A or T
actggtccaaaagctncaaaaatttgtctaagctgtactntgncatgnngaaatgnagatttccnacataaagttttctctctgaggcagcatttgngcctgccaaccctganncaccaccanacgcagttgactgaacaagggttttttcaagcttcagaangcnttaccaatnntgggtngnccaaaaancaaggcancgggtaaangaattggccatnggnccaancttngnntataaaannnnaangtcccnaantcntttanatngcntngaatnccggccnntga

SEQ ID NO: 718 - DNA, 107 bp, Nicotiana tabacum
  misc_feature (12)..(12): N = G, C, A or T
  misc_feature (33)..(33): N = G, C, A or T
  misc_feature (45)..(45): N = G, C, A or T
  misc_feature (56)..(56): N = G, C, A or T
  misc_feature (82)..(82): N = G, C, A or T
gatttagtgatnaatttccagcttattttttgntgtgagaggagngcagtatcagnactccttctggcgccaggataccatnaacaggtagccatcgaaggtgtaca

SEQ ID NO: 719 - DNA, 155 bp, Nicotiana tabacum
  misc_feature (7)..(7): N = G, C, A or T
gggaagntccaaacaaaaaagaaaaacgcagtaataccctccaaaaagcttcatctttctcaccaaagcctctttgctttggccatagaaaccagtaaccattagctatgtaaaaccattgcagctaccattttagaaacagtttcgaaacgcca

SEQ ID NO: 720 - DNA, 223 bp, Nicotiana tabacum
  misc_feature (8)..(8): N = G, C, A or T
  misc_feature (21)..(21): N = G, C, A or T
  misc_feature (34)..(34): N = G, C, A or T
  misc_feature (40)..(40): N = G, C, A or T
  misc_feature (41)..(41): N = G, C, A or T
  misc_feature (47)..(48): N = G, C, A or T
  misc_feature (52)..(53): N = G, C, A or T
  misc_feature (61)..(62): N = G, C, A or T
  misc_feature (65)..(65): N = G, C, A or T
  misc_feature (76)..(76): N = G, C, A or T
  misc_feature (78)..(78): N = G, C, A or T
  misc_feature (81)..(81): N = G, C, A or T
  misc_feature (96)..(96): N = G, C, A or T
  misc_feature (107)..(108): N = G, C, A or T
  misc_feature (113)..(113): N = G, C, A or T
  misc_feature (128)..(128): N = G, C, A or T
  misc_feature (131)..(131): N = G, C, A or T
  misc_feature (134)..(134): N = G, C, A or T
  misc_feature (154)..(154): N = G, C, A or T
  misc_feature (157)..(157): N = G, C, A or T
  misc_feature (188)..(188): N = G, C, A or T
  misc_feature (199)..(199): N = G, C, A or T
agcccttngtcagcccacctnttatgctcaatcncaccgnnaggaannctgnnagagttanngangcgattgattncngcnctgacagatcatatngcttctataanngttgngcggacacgcgaatnagnttncttaccctcgcataagacanatnctgatcttaccaaccactcattagatgtggnacctacagcanctacatcttctactgctgctaaca

SEQ ID NO: 721 - DNA, 246 bp, Nicotiana tabacum
  misc_feature (8)..(8): N = G, C, A or T
  misc_feature (10)..(10): N = G, C, A or T
  misc_feature (14)..(14): N = G, C, A or T
  misc_feature (59)..(59): N = G, C, A or T
  misc_feature (109)..(109): N = G, C, A or T
  misc_feature (122)..(122): N = G, C, A or T
  misc_feature (215)..(215): N = G, C, A or T
aggcattntncagngcgccacaagtatactggatttcccggagacatgtgactggagangcatcaccgcaagatttgtccgctcaaactctcattgatgctgccattgncatacaaaagtgnattcagcgggtggatagtaaggtcttctcttgtaagcacggaccaatctcctacagttcctaaggaatgtgaagagaatataaatgcagcggnagcaatccaacatgcttcaaaggaatataca

SEQ ID NO: 722 - DNA, 37 bp, Nicotiana tabacum
ggaaacatacaacgaatgccaaaatctgccattttga

SEQ ID NO: 723 - DNA, 66 bp, Nicotiana tabacum
  misc_feature (17)..(17): N = G, C, A or T
  misc_feature (21)..(21): N = G, C, A or T
ctttccgaatgctaccngatngtatcaattggggtgaactggttggggtttttttccccctttacc

SEQ ID NO: 724 - DNA, 89 bp, Nicotiana tabacum
  misc_feature (3)..(3): N = G, C, A or T
  misc_feature (8)..(8): N = G, C, A or T
  misc_feature (11)..(11): N = G, C, A or T
  misc_feature (72)..(72): N = G, C, A or T
tcnttgcnganatctaccttacatgttcctgatgcaatcatgacttactctgatttacacatgggttgctgngggctgattccatgtcc

SEQ ID NO: 725 - DNA, 104 bp, Nicotiana tabacum
gccttaaatggtgtgttctaacaggcttatgggtatgctggcattctccattgctgggcatacccacagcctgcccttgcctctttcaattttcctattccccc

SEQ ID NO: 726 - DNA, 148 bp, Nicotiana tabacum
  misc_feature (4)..(4): N = G, C, A or T
  misc_feature (12)..(12): N = G, C, A or T
  misc_feature (17)..(18): N = G, C, A or T
  misc_feature (22)..(22): N = G, C, A or T
  misc_feature (36)..(36): N = G, C, A or T
  misc_feature (38)..(39): N = G, C, A or T
  misc_feature (43)..(44): N = G, C, A or T
  misc_feature (47)..(47): N = G, C, A or T
  misc_feature (66)..(66): N = G, C, A or T
  misc_feature (69)..(69): N = G, C, A or T
  misc_feature (72)..(72): N = G, C, A or T
  misc_feature (75)..(75): N = G, C, A or T
  misc_feature (77)..(77): N = G, C, A or T
  misc_feature (78)..(78): N = G, C, A or T
  misc_feature (86)..(86): N = G, C, A or T
  misc_feature (96)..(96): N = G, C, A or T
  misc_feature (134)..(134): N = G, C, A or T
  misc_feature (136)..(136): N = G, C, A or T
gcgntacttcanagtcnngganagaggctaagaggncnnacannaantgcttcagtactaatgaancanatnctngnntctttttnagggacatancaggttttgacaagcccccacatgaataagaatatatnanacttctctaacc

SEQ ID NO: 727 - DNA, 166 bp, Nicotiana tabacum
  misc_feature (86)..(86): N = G, C, A or T
ttactgtttgtcctacctggtgatggatagtttgggttctgaataatttgtgggatgcaacaacaagcttttggttactttttgtnaagtacagtggttacttgaactagttgtgtaatatatgctatggtagtggtcgtatctcgaaacacgtgatatttagtgc

SEQ ID NO: 728 - DNA, 60 bp, Nicotiana tabacum
gccttggtaagacattcgtgaaaaaactctgttatttcttagagataaggtggttcccgc

SEQ ID NO: 729 - DNA, 168 bp, Nicotiana tabacum
gactcttgccaaaattgtatctaaatcctcatcttcctttgggattggccaagattggctggcaatgttggggcatttttgttcgagttgttcatgttggacaagtgactacctgatttagatgttgcagagcaaagctgtgcgattgtgttgtatgttattcttcta

SEQ ID NO: 730 - DNA, 500 bp, Nicotiana tabacum
  misc_feature (149)..(149): N = G, C, A or T
  misc_feature (208)..(208): N = G, C, A or T
  misc_feature (376)..(376): N = G, C, A or T
  misc_feature (405)..(405): N = G, C, A or T
  misc_feature (428)..(428): N = G, C, A or T
  misc_feature (452)..(452): N = G, C, A or T
gcccgacgcttgaaagattgcatttggagaaatgccaattgagaaataaggagagcttgagaacattgtttctactctgtcaagacgtcagagaggttattttccagaactgttggggactggataatgaaatgttcagccttgccagngttctaaggagagtgaagtccctttgcctggaaagctgttcactactcacaactgaagnccttgagtctgtcctcctttcatggaaggaaatccagagcctcaaggtgatttcatgtggcaatataaaggatagtgaaatcagtctagcactgtctaccttgttctccgcactaaaagatttacaatggagaccagactcaaaatctcttctttcagctggtgttgngggaacttgcatgcggaaaagaggcaatnaaatttttcaaagaagaccgtgngacttggaagtcacttgcctgggngcatagactggccttcctcatcatgcattcaggacaactctactatat

SEQ ID NO: 731 - DNA, 35 bp, Nicotiana tabacum
taggttttgtttagtgttttctaagttcttgtttt

SEQ ID NO: 732 - DNA, 89 bp, Nicotiana tabacum
  misc_feature (6)..(6): N = G, C, A or T
gaagcnactagttcaaaatatgtgcagtgttgatcatattcttttgttatggccagtttttaccatttgttggacacgtttgatgctgt

SEQ ID NO: 733 - DNA, 254 bp, Nicotiana tabacum
  misc_feature (8)..(9): N = G, C, A or T
  misc_feature (11)..(11): N = G, C, A or T
  misc_feature (19)..(19): N = G, C, A or T
  misc_feature (25)..(26): N = G, C, A or T
  misc_feature (28)..(28): N = G, C, A or T
  misc_feature (31)..(31): N = G, C, A or T
  misc_feature (38)..(38): N = G, C, A or T
  misc_feature (53)..(53): N = G, C, A or T
  misc_feature (75)..(75): N = G, C, A or T
  misc_feature (77)..(77): N = G, C, A or T
  misc_feature (134)..(134): N = G, C, A or T
gcccgtannangggttccnacaccnncntanggtcctnttttccttctgaatngagcctgcgataaactccatananaactagcaaaaagagctccattttttcactaaaaacaaccgttcaaacagctatganaatccctctatctccatcaaaaccgcagcatccatcatcctcaataaagggctgcacaaacctgctacaatcagcataaaaacagccctgaaactagcttctttcgagctaaaatcaact

SEQ ID NO: 734 - DNA, 43 bp, Nicotiana tabacum
  misc_feature (9)..(9): N = G, C, A or T
  misc_feature (18)..(18): N = G, C, A or T
tgtgctaangtagcccgntcttatcaataagtgcaaagtttgg

SEQ ID NO: 735 - DNA, 90 bp, Nicotiana tabacum
  misc_feature (17)..(17): N = G, C, A or T
  misc_feature (21)..(22): N = G, C, A or T
  misc_feature (74)..(75): N = G, C, A or T
taataaagccccggganaagnnaagaaaaaaaagagaaaaagaaactaggccgggtcaaggcaggccatattgnnagcactactgcctgg

SEQ ID NO: 736 - DNA, 323 bp, Nicotiana tabacum
  misc_feature (3)..(3): N = G, C, A or T
  misc_feature (28)..(28): N = G, C, A or T
tgngaccttttgaatctcccgagtctgnaggtctagtttactcccaatagacgagtatcactacaagtctactgcaaatggttgatgtttgatgtgggagacgaaacgataagcaatttagtaacatgtgtcctttttcacgtatatatagatagagcaagaatgaaaatggagacaccttttccatttttgaaggatatattgctgtttcttccctcaaagagagttttgtgcactatgtttggtagcttttcgagagtagtatgtttttatctcgttgaagcaacctccttttttcccccttgactagttgacttgaaggg

SEQ ID NO: 737 - DNA, 61 bp, Nicotiana tabacum
tgtttgtttatgaccctgctgggtcattggtaattatgtgtttagtactatgtcttggtgc

SEQ ID NO: 738 - DNA, 62 bp, Nicotiana tabacum
  misc_feature (17)..(17): N = G, C, A or T
  misc_feature (51)..(51): N = G, C, A or T
ctttcgtcggagctttngccgccgccggctaccatcagtacaatcctccgngctgggcgccc

SEQ ID NO: 739 - DNA, 106 bp, Nicotiana tabacum
  misc_feature (25)..(25): N = G, C, A or T
  misc_feature (47)..(47): N = G, C, A or T
tgaatcaccttttaaaaccacgggnaaaagtaaaagtaaaaaaaagnaggaaaaaggaaactaggccgggtcaagggcaggccatattgacagcactactgcctcg

SEQ ID NO: 740 - DNA, 127 bp, Nicotiana tabacum
  misc_feature (41)..(41): N = G, C, A or T
  misc_feature (83)..(83): N = G, C, A or T
  misc_feature (84)..(84): N = G, C, A or T
  misc_feature (114)..(114): N = G, C, A or T
tgcgagacattgcaactaagcaagctctttccctacattgncgtatcccagcacacagatatcacggggcatggagccatccnncagtgtcaaccagtgcgctatataggcggngacatgcggcgcg

SEQ ID NO: 741 - DNA, 113 bp, Nicotiana tabacum
  misc_feature (2)..(4): N = G, C, A or T
  misc_feature (6)..(6): N = G, C, A or T
  misc_feature (11)..(11): N = G, C, A or T
  misc_feature (34)..(34): N = G, C, A or T
  misc_feature (54)..(54): N = G, C, A or T
gnnngnggagnaagcaagcatagaaggagcaaantgttcattcactgtgagtangaagacaaagcaagaaataattcagaagctgattgaaatagtaaatgaaatatcaagca

SEQ ID NO: 742 - DNA, 233 bp, Nicotiana tabacum
ccctgcctgggaaatggtcaatttgaggaagggcattggcagctaacttgttatatgcgcaaagtcttgtatgacatagaagtagatggcaacagacaacaagttccaccagatgattccaaggttcaaactcaagaatcaaggtgtttttatgaaggaaatcaacataatgacaatgatggctactgggactataacttcttatttggaggtgcaggtggaggagaacatag

SEQ ID NO: 743 - DNA, 336 bp, Nicotiana tabacum
  misc_feature (125)..(125): N = G, C, A or T
  misc_feature (128)..(128): N = G, C, A or T
  misc_feature (304)..(305): N = G, C, A or T
  misc_feature (310)..(310): N = G, C, A or T
cctcagtctgaaaattccaacaccaatatgccccaatttgattctagcttgacccgtaacaatattggatcaaccccatattatggaagtcatgaaaacatgacatcaactaattaccatatggnganttatcataatatggtgcttcccaaggaaaatatgtcaaattttgaagagggttcttgttcaatagattcttatgacatgcaaacagatcatcacaacagtcgatggacatttcaagatgatggagatgaccttcagtcagtggctttcagatatcttcaacattcttgatcagtanntaggncttcaaaaacaaatcatgggtgaaga

SEQ ID NO: 744 - DNA, 246 bp, Nicotiana tabacum
  misc_feature (2)..(2): N = G, C, A or T
  misc_feature (5)..(5): N = G, C, A or T
  misc_feature (14)..(14): N = G, C, A or T
  misc_feature (25)..(25): N = G, C, A or T
  misc_feature (32)..(32): N = G, C, A or T
  misc_feature (36)..(36): N = G, C, A or T
  misc_feature (44)..(44): N = G, C, A or T
  misc_feature (52)..(52): N = G, C, A or T
  misc_feature (73)..(73): N = G, C, A or T
  misc_feature (79)..(79): N = G, C, A or T
  misc_feature (84)..(85): N = G, C, A or T
  misc_feature (96)..(96): N = G, C, A or T
  misc_feature (105)..(105): N = G, C, A or T
  misc_feature (107)..(107): N = G, C, A or T
  misc_feature (108)..(108): N = G, C, A or T
  misc_feature (121)..(121): N = G, C, A or T
  misc_feature (128)..(128): N = G, C, A or T
  misc_feature (132)..(132): N = G, C, A or T
  misc_feature (148)..(151): N = G, C, A or T
  misc_feature (161)..(161): N = G, C, A or T
  misc_feature (166)..(166): N = G, C, A or T
  misc_feature (173)..(173): N = G, C, A or T
  misc_feature (197)..(197): N = G, C, A or T
  misc_feature (233)..(233): N = G, C, A or T
  misc_feature (235)..(235): N = G, C, A or T
  misc_feature (237)..(237): N = G, C, A or T
  misc_feature (239)..(239): N = G, C, A or T
tnctntcatggtgngcctacattcnggacacngtantgatcctngccagcangattgtcttacgctactacanttggancgatnngccttacctgncggttttantnngaggacaataagntcgaccntccnatctgcctgagcattnnnnctatgatgancgatngggaggncattgtgccatctgcgagttgaangattatccacagtgagagccggaaacccctgcaatncnanantctgggt

SEQ ID NO: 745 - DNA, 29 bp, Nicotiana tabacum
  misc_feature (5)..(6): N = G, C, A or T
  misc_feature (13)..(13): N = G, C, A or T
  misc_feature (15)..(15): N = G, C, A or T
  misc_feature (17)..(17): N = G, C, A or T
ccttnngtggctngngntgtgctctgcgt

SEQ ID NO: 746 - DNA, 161 bp, Nicotiana tabacum
  misc_feature (2)..(2): N = G, C, A or T
gnttgtcctacctggtgatggatagtttgggttctgaataatttgtgggatgcaacaacaagcttttggttactttttgtcaagtacagtggttacttgaactagttgtgtaatatatgctatggtagtggtcgtatctcgaaacacgtgatatttagtgc

SEQ ID NO: 747 - DNA, 183 bp, Nicotiana tabacum
  misc_feature (1)..(1): N = G, C, A or T
nctttgaatttgaaccactacctaatatgaaagaatgcctgctcgtaatgaaatacttgtcatggtgtctctaccgagtcctttggctagggcaactcaatcaatatgcagtcgtaagaatgttttgaaatgcatatgtagtcatcatcggtgttttcacatttatgtgaatttggatgttcg

SEQ ID NO: 748 - DNA, 90 bp, Nicotiana tabacum
  misc_feature (32)..(32): N = G, C, A or T
  misc_feature (79)..(79): N = G, C, A or T
cctgcttgaggtccattcttttttctcctttnttttagttcgataacactatatgcgggtctctgatggttgtcgcgtntttttgggtgc

SEQ ID NO: 749 - DNA, 156 bp, Nicotiana tabacum
tttggaatacaattcaacttctgtttcctaaagaaatagaagcaagaaaagcagctggagctttgaatagtagagaagctcgacgcaaaagtccagtaagagctgctacagctcattctaacatctctagcagcagaatatcaagagtgttcgcgc

SEQ ID NO: 750 - DNA, 170 bp, Nicotiana tabacum
  misc_feature (29)..(29): N = G, C, A or T
  misc_feature (33)..(33): N = G, C, A or T
cagtatcccccttacttgtgtcaaatcancttntcccagtatggcttccatattttgactacaattcttatcagaaggcatgatagtaataagtgacaaagatgcaaaaaacataaaagttgtccttcacttttggttagaggctgaagatgaactttctaagttggaca

SEQ ID NO: 751 - DNA, 27 bp, Nicotiana tabacum
ttcgatcggtgaagcttctttaccaac

SEQ ID NO: 752 - DNA, 66 bp, Nicotiana tabacum
  misc_feature (8)..(8): N = G, C, A or T
  misc_feature (14)..(14): N = G, C, A or T
  misc_feature (17)..(17): N = G, C, A or T
tacaaagnaatgcngtnccaaaatacattgaaataattggcagccgaatactaaacttgatcatgt

SEQ ID NO: 753 - DNA, 144 bp, Nicotiana tabacum
cccgaatttcgtccgccaaattgtcgtgcataggaacagaacgagagccatcaatgccgtaggcgcctttcgcgtaccacatgacccgagaaaaaacaccggaaaggatttccgtgatttgtttctcggtgtagctacgccgca

SEQ ID NO: 754 - DNA, 76 bp, Nicotiana tabacum
  misc_feature (6)..(6): N = G, C, A or T
  misc_feature (10)..(10): N = G, C, A or T
  misc_feature (18)..(18): N = G, C, A or T
  misc_feature (25)..(26): N = G, C, A or T
  misc_feature (44)..(45): N = G, C, A or T
  misc_feature (55)..(55): N = G, C, A or T
ttggtnttgncacctgcnaatggcnntacatggagcagggacgnnaataagtggnacgagtgaccacatgagggag

SEQ ID NO: 755 - DNA, 111 bp, Nicotiana tabacum
  misc_feature (7)..(7): N = G, C, A or T
  misc_feature (50)..(50): N = G, C, A or T
  misc_feature (52)..(52): N = G, C, A or T
  misc_feature (61)..(61): N = G, C, A or T
catctcntcctcacttcttgaactgtacgcccaccctttttcttcttggntntgttcttanaagtttctggcacctgctttttgcttctattatcatcagcttcttcagga

SEQ ID NO: 756 - DNA, 318 bp, Nicotiana tabacum
  misc_feature (1)..(1): N = G, C, A or T
  misc_feature (36)..(36): N = G, C, A or T
  misc_feature (110)..(110): N = G, C, A or T
  misc_feature (174)..(174): N = G, C, A or T
  misc_feature (224)..(224): N = G, C, A or T
  misc_feature (244)..(244): N = G, C, A or T
  misc_feature (253)..(253): N = G, C, A or T
  misc_feature (254)..(254): N = G, C, A or T
  misc_feature (272)..(272): N = G, C, A or T
  misc_feature (282)..(282): N = G, C, A or T
  misc_feature (285)..(286): N = G, C, A or T
  misc_feature (292)..(292): N = G, C, A or T
  misc_feature (296)..(296): N = G, C, A or T
  misc_feature (312)..(312): N = G, C, A or T
nacaccaatatgccccaatttgattctagcttgacntgtaacaatattggatcaaccccatattatggaagtcatgaaaacatgacatcaactaattaccatatggaganttatcataatatggtgcttcccaaggaaaatatgtcaaattttgaagagggttcttgttcaatngattcttatgacatgcaaacagatcatcacaacagtcgatggacatttcnagatgatggagatgaccttnagtcagtgnntttcagatatcttcaacnttcttgatcngtnnctatgncttnaaaaacatatcatggntgatga

SEQ ID NO: 757 - DNA, 192 bp, Nicotiana tabacum
  misc_feature (19)..(19): N = G, C, A or T
  misc_feature (49)..(49): N = G, C, A or T
  misc_feature (83)..(86): N = G, C, A or T
  misc_feature (88)..(88): N = G, C, A or T
  misc_feature (122)..(122): N = G, C, A or T
ctttggggccgttcttggnatccgtcgaactagggtgttgaaatttctnttttttcttctttattgggttctattatcgattncatgngatattttatttccttatttgtgtttgagtaatngttttccatgtttgcttgttcgatttctaccactatataacccctccccaattacccttttggacagacc

SEQ ID NO: 758 - DNA, 191 bp, Nicotiana tabacum
  misc_feature (5)..(5): N = G, C, A or T
  misc_feature (10)..(10): N = G, C, A or T
  misc_feature (13)..(13): N = G, C, A or T
  misc_feature (21)..(21): N = G, C, A or T
  misc_feature (23)..(23): N = G, C, A or T
  misc_feature (25)..(25): N = G, C, A or T
  misc_feature (30)..(30): N = G, C, A or T
  misc_feature (37)..(37): N = G, C, A or T
  misc_feature (39)..(39): N = G, C, A or T
  misc_feature (46)..(46): N = G, C, A or T
  misc_feature (63)..(64): N = G, C, A or T
  misc_feature (67)..(67): N = G, C, A or T
  misc_feature (68)..(68): N = G, C, A or T
  misc_feature (77)..(77): N = G, C, A or T
  misc_feature (86)..(86): N = G, C, A or T
  misc_feature (97)..(97): N = G, C, A or T
  misc_feature (105)..(105): N = G, C, A or T
  misc_feature (126)..(126): N = G, C, A or T
  misc_feature (135)..(135): N = G, C, A or T
  misc_feature (141)..(141): N = G, C, A or T
  misc_feature (147)..(147): N = G, C, A or T
  misc_feature (152)..(152): N = G, C, A or T
  misc_feature (154)..(154): N = G, C, A or T
  misc_feature (156)..(157): N = G, C, A or T
  misc_feature (161)..(161): N = G, C, A or T
  misc_feature (171)..(171): N = G, C, A or T
  misc_feature (178)..(178): N = G, C, A or T
ggtanctctnggnctgcgaanangnctctnagccttncncaagcgngcgcgagagaagcggcnnacnnagctaccgnttcacccgnccgactaaaanacaacagncgcagacctactttgattcanaagaaaggngacggnttcgcnaacangnanncggntttctatcanaggtgcnagggttccaaacc

SEQ ID NO: 759 - DNA, 110 bp, Nicotiana tabacum
  misc_feature (4)..(4): N = G, C, A or T
  misc_feature (8)..(8): N = G, C, A or T
  misc_feature (15)..(16): N = G, C, A or T
  misc_feature (31)..(31): N = G, C, A or T
  misc_feature (104)..(104): N = G, C, A or T
cctntggngttctgnnaattcttgtacacanaagggcaaaacaaacaaaggaagagcagcaaagtatgagtagagcttcagtagtactagtagctattatggtngtggaa

SEQ ID NO: 760 - DNA, 67 bp, Nicotiana tabacum
  misc_feature (2)..(2): N = G, C, A or T
  misc_feature (13)..(13): N = G, C, A or T
gnggcattcggancgatggattggtcttcataacattcatcatctttacattgcagcatttcagaag

SEQ ID NO: 761 - DNA, 92 bp, Nicotiana tabacum
  misc_feature (7)..(7): N = G, C, A or T
  misc_feature (10)..(10): N = G, C, A or T
  misc_feature (12)..(13): N = G, C, A or T
  misc_feature (15)..(15): N = G, C, A or T
  misc_feature (17)..(17): N = G, C, A or T
  misc_feature (20)..(20): N = G, C, A or T
  misc_feature (22)..(23): N = G, C, A or T
  misc_feature (46)..(46): N = G, C, A or T
  misc_feature (53)..(53): N = G, C, A or T
  misc_feature (55)..(55): N = G, C, A or T
  misc_feature (64)..(65): N = G, C, A or T
  misc_feature (67)..(67): N = G, C, A or T
  misc_feature (83)..(83): N = G, C, A or T
tcaaaantantnncntnctngnnctgcacattgagcatgtgctcancaacctntnttgtgctcnntnttcccctgaacatagnagtatgcag

SEQ ID NO: 762 - DNA, 74 bp, Nicotiana tabacum
  misc_feature (4)..(5): N = G, C, A or T
  misc_feature (14)..(15): N = G, C, A or T
  misc_feature (18)..(18): N = G, C, A or T
  misc_feature (31)..(31): N = G, C, A or T
  misc_feature (46)..(47): N = G, C, A or T
  misc_feature (49)..(49): N = G, C, A or T
  misc_feature (51)..(51): N = G, C, A or T
  misc_feature (61)..(62): N = G, C, A or T
  misc_feature (65)..(65): N = G, C, A or T
  misc_feature (67)..(67): N = G, C, A or T
  misc_feature (69)..(69): N = G, C, A or T
  misc_feature (72)..(72): N = G, C, A or T
tagnncctgagacnnagnaagaagacagacngtcactgcaacgccnnangngagcatgacnngancngnggnac

SEQ ID NO: 763 - DNA, 42 bp, Nicotiana tabacum
  misc_feature (10)..(11): N = G, C, A or T
  misc_feature (14)..(15): N = G, C, A or T
  misc_feature (22)..(22): N = G, C, A or T
  misc_feature (32)..(32): N = G, C, A or T
ggcacaagtnnaanngcctgtntcgaaggtgnggcaacaacc

SEQ ID NO: 764 - DNA, 83 bp, Nicotiana tabacum
caacgtaaaggattcaattcttgttttgtttgttcatcattgaaataatttttttttagtcttgcattatatgtttggttggt

SEQ ID NO: 765 - DNA, 102 bp, Nicotiana tabacum
  misc_feature (8)..(8): N = G, C, A or T
  misc_feature (11)..(12): N = G, C, A or T
  misc_feature (20)..(20): N = G, C, A or T
  misc_feature (29)..(29): N = G, C, A or T
  misc_feature (30)..(30): N = G, C, A or T
  misc_feature (40)..(40): N = G, C, A or T
  misc_feature (44)..(44): N = G, C, A or T
  misc_feature (51)..(51): N = G, C, A or T
  misc_feature (53)..(53): N = G, C, A or T
  misc_feature (54)..(54): N = G, C, A or T
  misc_feature (61)..(61): N = G, C, A or T
  misc_feature (71)..(71): N = G, C, A or T
  misc_feature (81)..(81): N = G, C, A or T
  misc_feature (91)..(91): N = G, C, A or T
  misc_feature (96)..(96): N = G, C, A or T
  misc_feature (97)..(98): N = G, C, A or T
ggcttggnggnngcgggtgnccaccatgnnatgcatacantatncatgtangnngctacanagacacattnggaataatgngtcggatcgnttagnnntggg

SEQ ID NO: 766 - DNA, 134 bp, Nicotiana tabacum
  misc_feature (2)..(2): N = G, C, A or T
  misc_feature (8)..(9): N = G, C, A or T
  misc_feature (106)..(106): N = G, C, A or T
cncgattnnatacaaccctgagaaaagaatgttaaaaaatgactatcttttgtaaagaaacccctttcatttccaggcaatgcaagggggatcacagttttacatngtgggtgtggttattttacgtcacagtt

SEQ ID NO: 767 - DNA, 96 bp, Nicotiana tabacum
  misc_feature (10)..(10): N = G, C, A or T
  misc_feature (12)..(12): N = G, C, A or T
  misc_feature (17)..(17): N = G, C, A or T
  misc_feature (20)..(20): N = G, C, A or T
  misc_feature (22)..(22): N = G, C, A or T
  misc_feature (31)..(31): N = G, C, A or T
  misc_feature (44)..(44): N = G, C, A or T
  misc_feature (47)..(47): N = G, C, A or T
  misc_feature (50)..(50): N = G, C, A or T
  misc_feature (54)..(54): N = G, C, A or T
  misc_feature (62)..(62): N = G, C, A or T
  misc_feature (67)..(67): N = G, C, A or T
  misc_feature (75)..(75): N = G, C, A or T
  misc_feature (79)..(79): N = G, C, A or T
  misc_feature (80)..(81): N = G, C, A or T
  misc_feature (87)..(87): N = G, C, A or T
  misc_feature (94)..(94): N = G, C, A or T
acgatcgatnangtggnctngnaacattcancatactttacatnganatntcanaggttacncaggnctcatcantggnnnagcctntgctcancg

SEQ ID NO: 768 - DNA, 63 bp, Nicotiana tabacum
  misc_feature (23)..(24): N = G, C, A or T
  misc_feature (28)..(28): N = G, C, A or T
  misc_feature (54)..(54): N = G, C, A or T
  misc_feature (56)..(56): N = G, C, A or T
tcgcacacagtatcatgagaatnntggncttgtcatcctcaaaagaatcctgtnanagcatgg

SEQ ID NO: 769 - DNA, 135 bp, Nicotiana tabacum
  misc_feature (1)..(1): N = G, C, A or T
  misc_feature (10)..(10): N = G, C, A or T
  misc_feature (18)..(18): N = G, C, A or T
  misc_feature (31)..(31): N = G, C, A or T
  misc_feature (53)..(53): N = G, C, A or T
  misc_feature (91)..(91): N = G, C, A or T
  misc_feature (125)..(125): N = G, C, A or T
ntctacaatngcatacancatcaagcatagncaatcacaaacatgtcatgtanaagtcctgaaatttcgatgtcaggactaagctataagnactactacatggaaagcatatatgtgcattcgtngtccaagcat

SEQ ID NO: 770 - DNA, 339 bp, Nicotiana tabacum
gagcctgctggatcttctttctcttagcaaagaggaaaggaagaaactagtcgaagagcgccctggaatcaataattctactattactgctctcatttctctaaaatggaaggaattgagtgaagaagaaaaacaagtgtggaacaacaaagcagctgaagcatacaaaaaggaaatggaagagtacaacaaatctgtagcagaaaagcagaacaacaattagaaatagtagaaataactataatatgttcaactgattatgttgaacatagaatgattgctagttagttgaagtagtaaataggtatcattccaatttcctttgttgtttagtagcag

SEQ ID NO: 771 - DNA, 87 bp, Nicotiana tabacum
  misc_feature (5)..(5): N = G, C, A or T
  misc_feature (11)..(11): N = G, C, A or T
  misc_feature (15)..(16): N = G, C, A or T
  misc_feature (20)..(20): N = G, C, A or T
  misc_feature (24)..(24): N = G, C, A or T
  misc_feature (33)..(33): N = G, C, A or T
  misc_feature (39)..(40): N = G, C, A or T
  misc_feature (42)..(42): N = G, C, A or T
  misc_feature (52)..(53): N = G, C, A or T
  misc_feature (67)..(67): N = G, C, A or T
  misc_feature (79)..(79): N = G, C, A or T
  misc_feature (82)..(82): N = G, C, A or T
  misc_feature (85)..(85): N = G, C, A or T
tccgntgcaancggnncttncacncttagcaanaacacnntnctggggattnnagtcatgccacaantagcaggggctnagncgncc

SEQ ID NO: 772 - DNA, 135 bp, Nicotiana tabacum
  misc_feature (7)..(7): N = G, C, A or T
  misc_feature (10)..(10): N = G, C, A or T
  misc_feature (12)..(13): N = G, C, A or T
  misc_feature (32)..(32): N = G, C, A or T
  misc_feature (41)..(41): N = G, C, A or T
  misc_feature (46)..(46): N = G, C, A or T
  misc_feature (55)..(55): N = G, C, A or T
  misc_feature (57)..(58): N = G, C, A or T
  misc_feature (60)..(60): N = G, C, A or T
  misc_feature (66)..(66): N = G, C, A or T
  misc_feature (72)..(72): N = G, C, A or T
  misc_feature (78)..(78): N = G, C, A or T
  misc_feature (80)..(80): N = G, C, A or T
  misc_feature (84)..(84): N = G, C, A or T
  misc_feature (87)..(87): N = G, C, A or T
  misc_feature (90)..(91): N = G, C, A or T
  misc_feature (96)..(96): N = G, C, A or T
  misc_feature (98)..(98): N = G, C, A or T
  misc_feature (99)..(99): N = G, C, A or T
  misc_feature (117)..(117): N = G, C, A or T
  misc_feature (119)..(119): N = G, C, A or T
  misc_feature (122)..(122): N = G, C, A or T
  misc_feature (124)..(124): N = G, C, A or T
  misc_feature (126)..(126): N = G, C, A or T
  misc_feature (127)..(127): N = G, C, A or T
  misc_feature (129)..(129): N = G, C, A or T
  misc_feature (133)..(134): N = G, C, A or T
ggttctnctntnnctgctgcgcctgacagcanttgtgtggntctgncgctgcacncnncngctgtntacgcnggaggngnaaanggntgnncctgntnnggagtcacatgatgacangngtnananntngttnna

SEQ ID NO: 773 - DNA, 94 bp, Nicotiana tabacum
  misc_feature (2)..(2): N = G, C, A or T
  misc_feature (4)..(4): N = G, C, A or T
  misc_feature (17)..(18): N = G, C, A or T
  misc_feature (24)..(24): N = G, C, A or T
  misc_feature (41)..(41): N = G, C, A or T
  misc_feature (44)..(44): N = G, C, A or T
  misc_feature (51)..(51): N = G, C, A or T
  misc_feature (52)..(52): N = G, C, A or T
  misc_feature (64)..(64): N = G, C, A or T
  misc_feature (66)..(66): N = G, C, A or T
  misc_feature (69)..(70): N = G, C, A or T
  misc_feature (74)..(76): N = G, C, A or T
  misc_feature (80)..(80): N = G, C, A or T
  misc_feature (86)..(86): N = G, C, A or T
  misc_feature (91)..(91): N = G, C, A or T
  misc_feature (93)..(93): N = G, C, A or T
angngctatatcttcgnnagaaanactgctgcgcagtgtgnaanagcgtgnnttcacggtatgnanggnngatnnnactntgcagnaactncna

SEQ ID NO: 774 - DNA, 46 bp, Nicotiana tabacum
  misc_feature (7)..(7): N = G, C, A or T
  misc_feature (15)..(15): N = G, C, A or T
  misc_feature (31)..(31): N = G, C, A or T
  misc_feature (35)..(35): N = G, C, A or T
  misc_feature (36)..(36): N = G, C, A or T
  misc_feature (41)..(41): N = G, C, A or T
ctgttgntctttggncacatgatgattcagnttgnnaaatntgtgg

SEQ ID NO: 775 - DNA, 86 bp, Nicotiana tabacum
  misc_feature (27)..(28): N = G, C, A or T
  misc_feature (35)..(35): N = G, C, A or T
  misc_feature (41)..(41): N = G, C, A or T
  misc_feature (46)..(46): N = G, C, A or T
  misc_feature (63)..(63): N = G, C, A or T
  misc_feature (70)..(70): N = G, C, A or T
  misc_feature (73)..(73): N = G, C, A or T
  misc_feature (75)..(75): N = G, C, A or T
atagtaacgtgcctctttgtttctgcnntcaattnggctanagtcnagtggagtaacgcgtgngccattnttntngaagctgtcgg

SEQ ID NO: 776 - DNA, 97 bp, Nicotiana tabacum
  misc_feature (1)..(1): N = G, C, A or T
  misc_feature (14)..(14): N = G, C, A or T
  misc_feature (19)..(20): N = G, C, A or T
  misc_feature (25)..(25): N = G, C, A or T
  misc_feature (28)..(28): N = G, C, A or T
  misc_feature (39)..(39): N = G, C, A or T
  misc_feature (42)..(43): N = G, C, A or T
  misc_feature (60)..(60): N = G, C, A or T
  misc_feature (69)..(69): N = G, C, A or T
  misc_feature (75)..(75): N = G, C, A or T
ntttatgccggaanaaagnnaggcnagnatgcagatgcnggnnacataacgctaatatgnggatgaatnaggacnagcagcagtgaaactccttccc

SEQ ID NO: 777 - DNA, 92 bp, Nicotiana tabacum
  misc_feature (1)..(1): N = G, C, A or T
  misc_feature (6)..(6): N = G, C, A or T
  misc_feature (15)..(15): N = G, C, A or T
  misc_feature (23)..(23): N = G, C, A or T
  misc_feature (33)..(33): N = G, C, A or T
  misc_feature (37)..(37): N = G, C, A or T
  misc_feature (42)..(43): N = G, C, A or T
  misc_feature (45)..(45): N = G, C, A or T
  misc_feature (54)..(54): N = G, C, A or T
  misc_feature (59)..(59): N = G, C, A or T
  misc_feature (63)..(63): N = G, C, A or T
  misc_feature (65)..(65): N = G, C, A or T
  misc_feature (67)..(67): N = G, C, A or T
  misc_feature (78)..(78): N = G, C, A or T
  misc_feature (82)..(82): N = G, C, A or T
  misc_feature (83)..(86): N = G, C, A or T
  misc_feature (91)..(91): N = G, C, A or T
ngagtnaagggccantctgaatntggcctaatntggntaaanngnggggagtangccgnacanantnattcttgtggntggnnnnncgttna

SEQ ID NO: 778 - DNA, 54 bp, Nicotiana tabacum
  misc_feature (15)..(16): N = G, C, A or T
  misc_feature (35)..(35): N = G, C, A or T
  misc_feature (45)..(45): N = G, C, A or T
ctgatatggggattnngaggcaaggggtatggggnatcatgaagntggttgcag

SEQ ID NO: 779 - DNA, 56 bp, Nicotiana tabacum
  misc_feature (3)..(4): N = G, C, A or T
  misc_feature (20)..(20): N = G, C, A or T
  misc_feature (34)..(34): N = G, C, A or T
  misc_feature (36)..(36): N = G, C, A or T
  misc_feature (39)..(39): N = G, C, A or T
  misc_feature (43)..(43): N = G, C, A or T
gannaggcgctccctccttnctttgtgatgacancnatngaangagaagactccta

SEQ ID NO: 780 - DNA, 62 bp, Nicotiana tabacum
  misc_feature (13)..(13): N = G, C, A or T
  misc_feature (18)..(18): N = G, C, A or T
  misc_feature (20)..(20): N = G, C, A or T
  misc_feature (22)..(22): N = G, C, A or T
  misc_feature (27)..(27): N = G, C, A or T
  misc_feature (35)..(35): N = G, C, A or T
  misc_feature (45)..(45): N = G, C, A or T
  misc_feature (46)..(46): N = G, C, A or T
  misc_feature (53)..(53): N = G, C, A or T
  misc_feature (58)..(58): N = G, C, A or T
  misc_feature (61)..(61): N = G, C, A or T
gaagcatagcccngcgcngntngcgtnaatgagancacagatggnnctaaaanatgantgnt

SEQ ID NO: 781 - DNA, 62 bp, Nicotiana tabacum
  misc_feature (8)..(8): N = G, C, A or T
  misc_feature (35)..(35): N = G, C, A or T
  misc_feature (42)..(42): N = G, C, A or T
ccgcctantgcctgttaagtctagcaacctcctcnagagttngggaattcacaatggcagcc

SEQ ID NO: 782 - DNA, 82 bp, Nicotiana tabacum
  misc_feature (4)..(4): N = G, C, A or T
  misc_feature (13)..(13): N = G, C, A or T
  misc_feature (16)..(16): N = G, C, A or T
  misc_feature (30)..(30): N = G, C, A or T
  misc_feature (42)..(43): N = G, C, A or T
  misc_feature (47)..(47): N = G, C, A or T
  misc_feature (54)..(54): N = G, C, A or T
  misc_feature (60)..(60): N = G, C, A or T
  misc_feature (65)..(66): N = G, C, A or T
  misc_feature (72)..(72): N = G, C, A or T
  misc_feature (78)..(78): N = G, C, A or T
  misc_feature (80)..(81): N = G, C, A or T
gtanggccgagtnaanggtagcagaacttngaatgtgggacnngagngtacaangcgtcngacanngacttngtgtanannc

SEQ ID NO: 783 - DNA, 88 bp, Nicotiana tabacum
  misc_feature (3)..(3): N = G, C, A or T
  misc_feature (16)..(16): N = G, C, A or T
  misc_feature (47)..(47): N = G, C, A or T
  misc_feature (59)..(59): N = G, C, A or T
  misc_feature (66)..(66): N = G, C, A or T
  misc_feature (69)..(69): N = G, C, A or T
  misc_feature (84)..(84): N = G, C, A or T
  misc_feature (86)..(86): N = G, C, A or T
ggnagcgctagatgancaagacacaattgatatgcagtcttaggaanctagagagagantgtagantanggtgatgaacgcacntngg

SEQ ID NO: 784 - DNA, 91 bp, Nicotiana tabacum
  misc_feature (6)..(6): N = G, C, A or T
  misc_feature (25)..(25): N = G, C, A or T
  misc_feature (28)..(28): N = G, C, A or T
  misc_feature (39)..(39): N = G, C, A or T
  misc_feature (41)..(41): N = G, C, A or T
  misc_feature (53)..(53): N = G, C, A or T
  misc_feature (55)..(55): N = G, C, A or T
  misc_feature (59)..(59): N = G, C, A or T
  misc_feature (69)..(69): N = G, C, A or T
  misc_feature (72)..(72): N = G, C, A or T
tatttncctgcgtgacctagtaaanatngataggcctcnanaggtggggttantnaggnctcatcaatnccnagacccaaatcaggcaatc

SEQ ID NO: 785 - DNA, 97 bp, Nicotiana tabacum
  misc_feature (5)..(5): N = G, C, A or T
  misc_feature (8)..(8): N = G, C, A or T
  misc_feature (9)..(9): N = G, C, A or T
  misc_feature (17)..(17): N = G, C, A or T
  misc_feature (26)..(26): N = G, C, A or T
  misc_feature (34)..(35): N = G, C, A or T
  misc_feature (48)..(49): N = G, C, A or T
  misc_feature (54)..(54): N = G, C, A or T
  misc_feature (66)..(66): N = G, C, A or T
  misc_feature (67)..(68): N = G, C, A or T
  misc_feature (73)..(73): N = G, C, A or T
  misc_feature (77)..(78): N = G, C, A or T
  misc_feature (80)..(81): N = G, C, A or T
  misc_feature (87)..(88): N = G, C, A or T
  misc_feature (94)..(94): N = G, C, A or T
  misc_feature (97)..(97): N = G, C, A or T
aagcnganngacctgtnttgcacctnaatatccnnagccaaggaaganngacgntggctggatgannncaatncttnnannaaccanntactgnccn

SEQ ID NO: 786 - DNA, 17 bp, Artificial Sequence
  Oligonucleotide
ctcgtagactgcgtagt

SEQ ID NO: 787 - DNA, 18 bp, Artificial Sequence
  Oligonucleotide
gatcactacgcagtctac

SEQ ID NO: 788 - DNA, 16 bp, Artificial Sequence
  Oligonucleotide
gacgatgagtcctgag

SEQ ID NO: 789 - DNA, 14 bp, Artificial Sequence
  Oligonucleotide
tactcaggactcat

SEQ ID NO: 790 - DNA, 18 bp, Artificial Sequence
  Oligonucleotide
  misc_feature (16)..(16): N = T or C
  misc_feature (17)..(17): N = G, C, A or T
  misc_feature (18)..(18): if present N = G, C, A or T
gactgcgtagtgatcnnn

SEQ ID NO: 791 - DNA, 18 bp, Artificial Sequence
  Oligonucleotide
  misc_feature (17)..(17): N = G, C, A or T
  misc_feature (18)..(18): if present N = G, C, A or T
gatgagtcctgagtaann

1-16. (canceled)

17. An isolated cDNA consisting essentially of SEQ ID NO 61.

18. An isolated nucleic acid sequence consisting essentially of SEQ ID NO 61.

19. A method for the production of an agrochemical resistant plant, comprising the use of SEQ ID NO 61 by transforming a plant with SEQ ID NO 61 and regenerating a transformed plant thereafter.

20. A plant tolerant to an agrochemical, in which the expression level of the nucleic acid corresponding to SEQ ID NO 61 is modulated.
